(19) United States
(12) Patent Application Publication
(10) Pub. No.: US 2022/0348952 A1
(43) Pub. Date: Nov. 3, 2022

(54) COMPOSITIONS AND METHODS CONFERRING RESISTANCE TO RUST DISEASES

(71) Applicant: TECHNOLOGY INNOVATION MOMENTUM FUND (ISRAEL) LIMITED PARTNERSHIP, Tel-Aviv (IL)

(72) Inventors: Amir SHARON, Tel Aviv (IL); Eitan MILLET, Tel Aviv (IL); Anna MINZ-DUB, Tel Aviv (IL); Sofia KHAZAN, Tel Aviv (IL)

(21) Appl. No.: 17/624,002

(22) PCT Filed: Jul. 2, 2020
(86) PCT No.: PCT/IL2020/050739

§ 371 Date: Dec. 30, 2021

Related U.S. Application Data
(60) Provisional application No. 62/870,070, filed on Jul. 3, 2019.

(51) Int. Cl. C12N 15/82; C12Q 1/6895

(52) U.S. Cl. CPC C12N 15/8282; C12Q 1/6895; C12Q 2600/13

(57) ABSTRACT

The present invention relates to polynucleotides which confer or enhance resistance or tolerance to leaf rust and stripe rust disease onto wheat plants. The present invention further relates to methods of using the resistance-conferring polynucleotides for producing resistant or tolerant wheat plants and to heat plants so produced.

### FIELD OF THE INVENTION

[0001] The present invention relates to polynucleotides which confer or enhance resistance or tolerance of wheat plants towards the rust diseases leaf rust and stripe rust and to wheat plants comprising the polynucleotides that are resistant or tolerant to the rust disease as well as to methods of producing same.

### BACKGROUND OF THE INVENTION

[0002] Leaf rust, caused by the fungus Puccinia triticina tritici and stripe (yellow) rust, caused by Puccinia striiformis tritici, are major wheat diseases. Leaf rust and stripe rust cause tremendous yield losses annually. In the last years, stripe rust outbreaks were reported in Australia, China, Pakistan, Central and West Asia, the Middle East (Syria and Turkey), India and U.S.A., indicating virulence changes of the pathogen (Wellings C R et al., 2012. CAB International, pp. 63-83). It was also shown that new stripe rust strains became adapted to higher inoculation temperatures that may account for the hazardous spread of the pathogen (Milus E A et al., 2006. Plant Disease, 90:847-852)

[0003] Sharon goatgrass (Aegilops sharonensis Eig) (AES) is a wild diploid (genome S^{sh}S^{sh}; 2n=14) relative of wheat. It is native to the coastal plain of Israel and south Lebanon, growing on stabilized dunes. Work done by Olivera et al. (Olivera P. D. et al. 2007. Plant Disease 91:942-950) on a representative sample of Sharon goatgrass lines collected in Israel and data from the Institute for Cereal Crops Improvement (ICCI, Israel) (Anikster Y. et al. 2005. Plant Disease 89:303-308) revealed that many accessions are highly resistant to inoculation with leaf rust or stripe rust pathogens. A recent evaluation of 1800 newly collected AES accessions at the ICCI confirmed the high frequency of resistance to these diseases in the species. Genetic analysis in a number of these lines (Olivera P. D. et al. 2008. Phytopathology 98:353-358) demonstrated monogenic inheritance of the resistance genes.

[0004] Although the Sharon goatgrass Ss^{h} genome is closely related to the B genome of tetraploid and hexaploid wheat, the two genomes cannot be regarded as being homologous. Gene transfer from Sharon goatgrass may therefore be more difficult as compared to transfer from donor species with homologous genomes. Technical problems (e.g. timing of flowering, time of anther dehiscence) and inherent low crossability with wheat result in very low hybrid seed set. Thereafter, pairing and chromosome segment exchange is rare.

[0005] Different procedures have been utilized to transfer genes from wild relatives to wheat (e.g. Feldman M. 1983. Acta Biol. Yugoslay. Genet. 15: 145-161; Millet E. 2007. Isr. J. Plant Sci. 55:277-287; Millet E et al., 2007. CAB International pp. 554-563.; Qi L et al., 2007. Chrom. Res. 15:3-19; Kilian B et al., 2011. Aegilops. In Wild Crop Relatives: Genomic and Breeding Resources, Cereals. Edited by C. Kole Springer-Verlag, Berlin

[0006] Heidelberg, pp. 1-76), many of which included production of an amphiploid by chromosome duplication of the interspecific hybrid and use of mutants of the Ph genes, which suppresses homoeologous pairing, and particularly the ph1b allele to allow such pairing.

[0007] In addition, Sharon goatgrass possesses gametocidal (Gc) genes (Maan S. 1975.

[0008] Crop Sci. 15:287-292; Endo T R. 1985. Jpn. J. Genet. 60: 125-135). Only few AES accessions have been used in genetic studies, but all of them showed a gametocidal effect as reflected in the failure to obtain the whole pure series of addition lines of AES. The finding that chromosome 4Ss^{h} was always included in breeding progenies (Zhang H. et al 2001. Theor. Appl. Genet 103:518-525), supports the contention that Gc genes cause preferential transmission of their hosting chromosome. Their presence in a plant is accompanied by chromosome breakage of gametes not carrying the Gc genes, ultimately leading to semi-sterile spikes.

[0009] To avoid this gametocidal effect, an “anti-gametocidal” wheat mutant (Gc2^{mut}; Friebe B. et al. 2003. Chromosoma 111:509-517) that confers normal chromosome segregation rather than preferential transmission of the chromosome carrying the gametocidal gene may be used.

[0010] Despite its high resistance to different wheat diseases, Sharon goatgrass has hardly been exploited to improve wheat. Marais et al. (Marais G F et al., 2003. S Afr J Plant Soil 20:193-198) have identified potential useful resistance genes in Sharon goatgrass that were introgressed into common wheat chromosomes. In a further work leaf rust and stripe rust resistance genes, designated Lr56/Yr38, were transferred from Sharon goatgrass to chromosome 6A of common wheat (Marais G F et al. 2006. Euphytica 149:373-380). The translocation break occurred in the area of the long arm of wheat chromosome 6A. The Lr56/Yr38 translocation chromosome was found in effect to be most of the Sharon goatgrass chromosome with the terminal segment of its long arm replaced by a corresponding segment of wheat 6AL chromosome. In an attempt to reduce the amount of the transferred chromatin they employed recombination in the absence of the homoeologous pairing suppressor gene, Ph1, and obtained an intercalary sub-telomeric small introgression carrying the Lr56/Yr38 linked genes (Marais G F et al., 2010. Euphytica 171:15-22).

[0011] International (PCT) Patent Applications Publication Nos. WO 1995/029238 and WO 1999/045118 disclose genetic sequences which confer or otherwise facilitate disease resistance in plants such as against rust and mildew. The Application provides transgenic plants carrying the subject genetic sequences enabling the generation of disease resistant plants, particularly disease resistant crop varieties.

[0012] International (PCT) Patent Applications Publication No. WO 2013/082335 relates to new disease resistant crops and methods of creating new disease resistant crops. Particularly, the Application discloses a wheat genetic line comprising four highly effective disease resistance genes, Lr19, Sr25, Bdv3 and Qfhs.pur-7EL from the wheat-related grasses, Thinopyrum intermedium and Th. Ponticum, all on the long arm of wheat chromosome 7D. The genes are expected to remain in coupling in wheat genetic lines, resulting in wheat genetic lines with reduced susceptibility to yellow dwarf virus, fusarium head blight, stem rust, and leaf rust.

[0013] International (PCT) Patent Applications Publication No. WO 2014197505 discloses transgenic wheat 2174 cultivar with increased resistance to diseases caused by foliar pathogens, including leaf rust, stripe rust, stem rust, and powdery mildew, as well as barley yellow dwarf virus and methods for making the transgenic cultivar. The methods involve genetically engineering (transforming) 2174 to overexpress cDNA encoding the resistance gene LR34 in a form that is correctly spliced.

[0014] International (PCT) Patent Applications Publication No. WO 2015/036995 to inventors of the present invention discloses introgression of a large segment of chromosome 6S ^{sh} of Aegilops sharonensis Accession TH548, spanning from position 30cM to position 70cM into wheat chromosome 6B, the introgression conferring or enhancing resistance of the wheat plant to leaf rust and/or stripe disease. A paper of inventors of the present invention and co-workers published after the priority date of the present invention describes a shorter segment characterized by SNP markers conferring or enhancing resistance to both leaf rust and strip diseases caused by highly virulent Puccinia races (Khazan Set al.2020. BMC Plant Biology 20(153). doi.org/10.1186/s12870-020-2306-9.

[0015] International (PCT) Patent Applications Publication No. WO 2019197408 discloses an isolated nucleic acid encoding a nucleotide-binding and leucine-rich repeat (NLR) polypeptide comprising a zinc-finger BED domain, wherein expression of the NLR polypeptide in a plant confers or enhances resistance of the plant to a fungus, for example wheat yellow (stripe) rust fungus Puccinia striiformis f. sp. tritici.

[0016] It is well accepted that using resistant varieties is the most efficient and economical way to control the leaf rust and stripe rust diseases. However, high pace of alterations of the pathogens quickly erodes the primary pool of rust resistance genes. The incidence of severe rust outbreaks has intensified in the past years, primarily due to the appearance of highly virulent races of the pathogen that overcome popular rust resistance sources (Hovmøller M S et al, 2016. Plant Pathol 65:402-411; Liu T et al, 2017. Plant disease 101:1522-1532). This situation is expected to worsen due to further elimination of the remaining sources of rust resistance that have been used in wheat breeding, along with climatic changes that create favorable conditions for disease outbreak (Lyon and Broders, 2017). Hence, new sources of rust resistance are needed to boost the rust resistance gene pool of wheat. In addition, there is a need for resistance-conferring genetic elements that can be introduced into the wheat genome without negatively affecting the wheat growth characteristics and, most importantly, the yield.

[0017] Thus, there is a recognized need for and it would be highly advantageous to have genetic elements conferring or enhancing resistance of commercial agricultural wheat cultivars towards rust diseases without negatively affecting the agricultural characteristics of the wheat cultivars.

### SUMMARY OF THE INVENTION

[0018] The present invention provides polynucleotide sequences that confers, enhances or otherwise facilitates the resistance of wheat plants and cultivars comprising these sequences in their genome to leaf rust and stripe rust diseases. The present invention further provides wheat plants that are resistant to highly virulent forms of Puccinia fungi inducing leaf rust and stripe rust diseases, including resistant elite wheat cultivars.

[0019] The present invention is based in part of the unexpected discovery of a short segment of Aegilops sharonensis chromosome 6S ^{sh} (spanning between about position 34 Mbp to about position 62 Mbp of the 6S^{sh} chromosome), parts of which suffice to enhance resistance to leaf rust and stripe rust diseases. This discovery is of high significance, enabling easier genetic manipulations for transforming the resistance-conferring segment to susceptible plants. The present invention further discloses that inserting the segment or a part thereof to susceptible wheat cultivar, particularly into the wheat chromosome 6B at between about position 33 Mbp to about position 50Mbp results in conferring significant resistance to the wheat to both leaf rust and strip rust diseases without negatively affecting the wheat cultivar phenotype.

[0020] According to one aspect, the present invention provides a wheat plant comprising in its genome a heterologous polynucleotide segment conferring or enhancing resistance of the wheat plant to leaf rust and stripe rust diseases, wherein the heterologous polynucleotide segment comprises at least one scaffold having a nucleic acid sequence at least 70% homologous to a nucleic acid sequence set forth in any one of SEQ ID NOs:1-31 or a part thereof. Each possibility represents a separate embodiment of the present invention.

[0021] According to certain embodiments, the heterologous polynucleotide segment comprises at least one scaffold having a nucleic acid sequence at least 75%, at least 80%, at least 85%, at least 90% or at least 95% homologous to a nucleic acid sequence set forth in any one of SEQ ID NOs:1-31 or a part thereof. Each possibility represents a separate embodiment of the present invention.

[0022] According to certain embodiments, the heterologous polynucleotide segment comprises at least one scaffold having the nucleic acid sequence set forth in any one of SEQ ID NOs:1-31 or part thereof. Each possibility represents a separate embodiment of the present invention.

[0023] According to certain exemplary embodiments, the heterologous polynucleotide segment comprises at least one scaffold at least 70% homologous a nucleic acid sequence set forth in any one of SEQ ID NO:1, SEQ ID NO:3, SEQ ID NO:31, SEQ ID NO:23, SEQ ID NO:2 or a part thereof. Each possibility represents a separate embodiment of the present invention.

[0024] According to certain embodiments, the heterologous polynucleotide segment comprises at least one scaffold having a nucleic acid sequence at least 70%, at least 75%, at least 80%, at least 85%, at least 90% or at least 95% homologous to a nucleic acid sequence set forth in any one of SEQ ID NO:1, SEQ ID NO:3, SEQ ID NO:31, SEQ ID NO:23, SEQ ID NO:2 or a part thereof. Each possibility represents a separate embodiment of the present invention.

[0025] According to certain embodiments, the heterologous polynucleotide segment comprises a scaffold at least 95% homologous to the nucleic acid sequence set forth in SEQ ID NO:1 or a part thereof. According to some embodiments, the heterologous polynucleotide segment comprises a scaffold having the nucleic acid sequence set forth in SEQ ID NO:1.

[0026] According to certain embodiments, the heterologous polynucleotide segment comprises a scaffold at least 95% homologous to the nucleic acid sequence set forth in SEQ ID NO:3 or a part thereof. According to some embodiments, the heterologous polynucleotide segment comprises a scaffold having the nucleic acid sequence set forth in SEQ ID NO:3.

[0027] According to certain embodiments, the heterologous polynucleotide segment comprises a scaffold at least 95% homologous to the nucleic acid sequence set forth in SEQ ID NO:31 or a part thereof. According to some embodiments, the heterologous polynucleotide segment comprises a scaffold having the nucleic acid sequence set forth in SEQ ID NO:31.

[0028] According to certain embodiments the heterologous polynucleotide segment comprises a scaffold at least 95% homologous to the nucleic acid sequence set forth in SEQ ID NO:23 or part thereof. According to some embodiments, the heterologous polynucleotide segment comprises a scaffold having the nucleic acid sequence set forth in SEQ ID NO:23.

[0029] According to certain embodiments the heterologous polynucleotide segment comprises a scaffold at least 95% homologous to the nucleic acid sequence set forth in SEQ ID NO:2 or part thereof. According to some embodiments, the heterologous polynucleotide segment comprises a scaffold having the nucleic acid sequence set forth in SEQ ID NO:2.

[0030] According to certain embodiments, the length of heterologous polynucleotide segment is in the range of from about 5Kbp to about 28Mbp, from about 20Kbp to about 15Mbp, or from about 50Kbp to about 1Mbp. According to some embodiments, the length of the heterologous polynucleotide segment is from about 5Kbp to about 1Mbp, from about 5Kbp to about 50 Kbp or from about 5Kbp to about 20Kbp. Each possibility represents a separate embodiment of the present invention.

[0031] According to certain embodiments, the heterologous polynucleotide segment comprises a fragment of chromosome 6S^{sh} of Aegilops sharonensis Accession TH548, seed of which have been deposited with NCIMB Ltd. as the International Depositary

[0032] Authority under Accession No. NCIMB 43567. According to certain embodiments, the fragment comprises a nucleic acid sequence present within Ae. sharonensis chromosome 6S^{sh} from about position 34 Mbp to about position 62 Mbp.

[0033] According to certain embodiments, the heterologous polynucleotide segment comprises a nucleic acid marker designated 2-3HS2, wherein the marker is amplified by a pair of primers comprising a forward primer comprising the nucleic acid sequence set forth in SEQ ID NO:32 and a reveres primer comprising the nucleic acid sequence set forth in SEQ ID NO:33.

[0034] According to certain exemplary embodiments, the marker comprises a nucleic acid sequence at least 90% homologous to SEQ ID NO:34. According to further certain exemplary embodiments, the marker comprises the nucleic acid sequence set forth in SEQ ID NO:34. According to additional or alternative embodiments, the fragment of the Ae. sharonensis chromosome 6S^{sh} comprises at least one scaffold or a part thereof selected from the group consisting of: scaffold 19799 having the nucleic acid sequence of SEQ ID NO:1 positioned around 58Mbp; scaffold 00757 having the nucleic acid sequence of SEQ ID NO:3 positioned around 57.5Mbp; Scaffold 1934717 having the nucleic acid sequence of SEQ ID NO:31 positioned around 57.7 Mbp; scaffold 1549600 having the nucleic acid sequence of SEQ ID NO:23 positioned around 56Mbp; scaffold 20860 having the nucleic acid sequence of SEQ ID NO:2 positioned around 44Mbp; scaffold 1540406 having the nucleic acid sequence of SEQ ID NO:4 positioned around 32Mbp; scaffold 1900261 having the nucleic acid sequence of SEQ ID NO:5 positioned around 33Mbp; scaffold 1933170 having the nucleic acid sequence of SEQ ID NO:6 positioned around 34Mbp; scaffold 1531163 having the nucleic acid sequence of SEQ ID NO:7 positioned around 35Mbp; scaffold 1927703 having the nucleic acid sequence of SEQ ID NO:8 positioned around 35Mbp; scaffold 1895355 having the nucleic acid sequence of SEQ ID NO:9 positioned around 38Mbp; scaffold 1931208 having the nucleic acid sequence of SEQ ID NO:10 positioned around 38Mbp; scaffold 1935984 having the nucleic acid sequence of SEQ ID NO:11 positioned around 39Mbp; scaffold 1913977 having the nucleic acid sequence of SEQ ID NO:12 positioned around 42Mbp; scaffold 1916860 having the nucleic acid sequence of SEQ ID NO:13 positioned around 43Mbp; scaffold 1891763 having the nucleic acid sequence of SEQ ID NO:14 positioned around 44Mbp; scaffold 1937448 having the nucleic acid sequence of SEQ ID NO:15 positioned around 44Mbp; scaffold 1896571 having the nucleic acid sequence of SEQ ID NO:16 positioned around 46Mbp; scaffold 1528020 having the nucleic acid sequence of SEQ ID NO:17 positioned around 47Mbp; scaffold 1935712 having the nucleic acid sequence of SEQ ID NO:18 positioned around 47Mbp; scaffold 1893110 having the nucleic acid sequence of SEQ ID NO:19 positioned around 48Mbp or around 57Mbp; scaffold 1898148 having the nucleic acid sequence of SEQ ID NO:20 positioned around 51Mbp; scaffold 1934541 having the nucleic acid sequence of SEQ ID NO:21 positioned around 51Mbp; scaffold 1538547 having the nucleic acid sequence of SEQ ID NO:22 positioned around 56Mbp; scaffold 1872406 having the nucleic acid sequence of SEQ ID NO:24 positioned around 56Mbp; scaffold 1889560 having the nucleic acid sequence of SEQ ID NO:25 positioned around 58Mbp; scaffold 75951 having the nucleic acid sequence of SEQ ID NO:26 positioned around 58Mbp; scaffold 1893791 having the nucleic acid sequence of SEQ ID NO:27 positioned around 59Mbp; scaffold 1892710 having the nucleic acid sequence of SEQ ID NO:28 positioned around 61Mbp; scaffold 1926247 having the nucleic acid sequence of SEQ ID NO:29 positioned around 57.5 Mbp; Scaffold 1929618 having the nucleic acid sequence of SEQ ID NO:30 positioned around 57.4 Mbp; and any combination thereof. Each possibility represents a separate embodiment of the present invention.

[0035] According to certain exemplary embodiments, the fragment of the Ae. sharonensis chromosome 6S^{sh} comprises at least one of scaffold 19799, scaffold 00757, Scaffold 1934717, scaffold 1549600, scaffold 20860, and fragments thereof. Each possibility represents a separate embodiment of the present invention.

[0036] According to certain embodiments, the fragment of the Ae. sharonensis chromosome 6S^{sh} comprises scaffold 20860 located around position 44Mbp of Ae. sharonensis chromosome 6S^{sh}, having the nucleic acid sequence set forth in SEQ ID NO:2 or a part thereof.

[0037] According to certain embodiments, the fragment of the Ae. sharonensis chromosome 6S^{sh} comprises scaffold 19799 located around position 58Mbp of Ae. sharonensis chromosome 6S^{sh}, having the nucleic acid sequence set forth in SEQ ID NO:1 or a part thereof.

[0038] According to certain embodiments, the fragment of the Ae. sharonensis chromosome 6S′ comprises scaffold 00757 located around position 57.5Mbp of Ae. sharonensis chromosome 6S^{sh}, having the nucleic acid sequence set forth in SEQ ID NO:3 or a part thereof.

[0039] According to certain embodiments, the fragment of the Ae. sharonensis chromosome 6S^{sh} comprises scaffold 1934717 located around position 57.7 Mbp of Ae. sharonensis chromosome 6Ss^{h}, having the nucleic acid sequence of SEQ ID NO:31 or a part thereof.

[0040] According to certain embodiments, the fragment of the Ae. sharonensis chromosome 6S^{sh} comprises scaffold 1549600 located around position 56Mbp of Ae. sharonensis chromosome 6Ss^{h}, having the nucleic acid sequence of SEQ ID NO:23 or a part thereof.

[0041] According to certain embodiments, the heterologous polynucleotide segment is devoid of the nucleic acid sequence set forth in SEQ ID NO:35, SEQ ID NO:36, or a combination thereof.

[0042] According to certain embodiments, the heterologous polynucleotide segment is located within chromosome 6B of the wheat plant. According to certain exemplary embodiments, the heterologous polynucleotide segment is located within wheat chromosome 6B at a position between about 33 Mbp to about 50 Mbp.

[0043] According to certain embodiments, the heterologous polynucleotide segment is a nucleic acid construct further comprising at least one regulatory element. The nucleic acid construct can be a transformation vector, an expression vector or a combination thereof.

[0044] According to certain exemplary embodiments, the wheat plant of the present invention is a cultivar suitable for commercial agricultural growth, but it is not restricted to a specific species, strain or variety. According to certain exemplary embodiments, the wheat cultivar comprising the heterologous polynucleotide segment is of a species selected from the group consisting of Triticum turgidum and Triticum aestivum. According to certain embodiments, the wheat plant is an elite agricultural cultivar.

[0045] According to certain embodiments, the wheat plant is homozygous for chromosome 6B comprising the heterologous polynucleotide segment. According to other embodiments, the wheat plant is heterozygous, comprising a native wheat chromosome 6B and chromosome 6B comprising the heterologous polynucleotide segment.

[0046] According to certain embodiments, the wheat plant comprising the heterologous polynucleotide segment shows a phenotype of enhanced resistance or tolerance to leaf rust and stripe rust diseases compared to a corresponding plant not comprising within its genome the heterologous polynucleotide segment.

[0047] According to some embodiments, the wheat plant comprises the functional homoeologous pairing suppressor gene Ph1. It is to be explicitly understood that the wheat is devoid of the ph1 mutant allele(s).

[0048] According to additional embodiments, the wheat plant is devoid of Ae. sharonensis gametocidal Gc2 gene and/or a mutant thereof.

[0049] It is to be explicitly understood that the wheat plants and cultivars of the present invention are fertile. Seeds and any other plant part that can be used for propagation, including isolated cells and tissue cultures are also encompassed within the scope of the present invention. It is to be understood that the plant produced from said seeds or other propagating material comprises the heterologous polynucleotide segment that confers or enhances resistance to leaf rust and strip rust diseases as described herein.

[0050] According to certain embodiments, leaf rust disease is caused by the fungus Puccinia triticina. According to certain exemplary embodiments, the leaf rust disease is caused by Puccinia triticina tritici. According to certain embodiments, stripe rust disease is caused by the fungus Puccinia striiformis. According to certain exemplary embodiments, the stripe rust disease is caused by Puccinia striiformis tritici.

[0051] According to additional aspect, the present invention provides a wheat plant comprising within its genome a heterologous polynucleotide segment comprising at least one scaffold having a nucleic acid sequence at least 70% homologous to a nucleic acid sequence set forth in any one of SEQ ID NOs:1-31 or a part thereof, wherein the polynucleotide confers or enhances resistance of the wheat plant to a disease caused by the fungus Puccinia.

[0052] The heterologous polynucleotide segment is as described herein above. According to certain embodiments, the Puccinia is Puccinia triticina and the disease is leaf rust. According to certain embodiments, the Puccinia is Puccinia striiformis and the disease is stripe rust.

[0053] According to yet additional aspect the present invention provides a method for producing a wheat plant having enhanced resistance to leaf rust and strip rust diseases, the method comprises introducing into at least one cell of a wheat plant susceptible to the rust diseases a heterologous polynucleotide segment comprising at least one scaffold having a nucleic acid sequence at least 70% homologous to a nucleic acid sequence set forth in any one of SEQ ID NOs:1-31 or a part thereof, thereby producing a wheat plant having enhanced resistance to said rust diseases compared to a corresponding control plant.

[0054] According to certain embodiments, the heterologous polynucleotide segment is introduced into chromosome 6B of the at least one cell of the susceptible wheat plant.

[0055] According to certain exemplary embodiments, the heterologous polynucleotide segment is introduced into a position within wheat chromosome 6B at between about 33 Mbp to about 50Mbp.

[0056] According to certain embodiments, the wheat plant is a wheat cultivar as described hereinabove.

[0057] According to certain embodiments, the control plant is a wheat plant or cultivar susceptible to leaf rust and stripe rust disease. According to some embodiments, the control plant is lacking the heterologous polynucleotide segment. According to certain embodiments, the control wheat plant has the same genetic background.

[0058] Any method as is known to a person skilled in the art can be used to introduce the heterologous polynucleotide segment of the present invention into a susceptible wheat plant.

[0059] According to certain embodiments, the heterologous polynucleotide segment is an isolated polynucleotide or a construct comprising same. According to these embodiments, the heterologous polynucleotide segment is introduced by transforming said isolated polynucleotide or construct comprising same into at least one cell of the susceptible wheat plant. According to certain embodiments, the isolated polynucleotide is introduced by subjecting at least one cell of the susceptible wheat plant to genome editing using artificially engineered nucleases.

[0060] According to certain embodiments, the heterologous polynucleotide segment forms part of chromosome 6S^{sh} of Ae. sharonensis. According to certain exemplary embodiments, the Ae. sharonensis is Ae. sharonensis Accession TH548 described hereinabove. According to these embodiments, the heterologous polynucleotide segment is introduced to the susceptible wheat plant without prior isolation by introgression of Ae. sharonensis chromosome 6S^{sh} fragment spanning from about position 34 to about position 64 or a part thereof into the susceptible wheat plant.

[0061] According to additional aspect, the present invention provides a method for selecting a wheat plant having an enhanced resistance to leaf rust and stripe rust diseases, comprising the steps of:
[0062] a. providing a plurality of plants each comprising at least one cell comprising a heterologous polynucleotide segment conferring or enhancing resistance of the wheat cultivar to leaf rust and stripe rust disease wherein the heterologous polynucleotide segment is at least 70% homologous to a nucleic acid sequence set forth in any one of SEQ ID NOs:1-31 or a part thereof; and
[0063] b. selecting plants showing an enhanced resistance to said rust diseases compared to a control wheat plant or to a pre-determined resistance score value;

[0064] thereby selecting a plant having enhanced resistance to said rust diseases.

[0065] According to certain embodiments, the control plant is a wheat plant susceptible to the rust diseases. According to some embodiments, the susceptible control wheat plant is of the same genetic background.

[0066] According to certain embodiments, selecting plants resistant to the rust diseases is performed by inoculating the plants with the respective fungus and selecting phenotypically resistant plants. According to certain exemplary embodiments, the inoculation and selection is performed at the seedling stage of the plants.

[0067] The respective fungus is as described hereinabove.

[0068] According to additional or alternative embodiments, selecting plants resistant to the rust diseases is performed by detecting the presence of the heterologous polynucleotide segment within the genome of the wheat plant. Any method as is known in the art can be used to detect the heterologous polynucleotide segment. According to certain exemplary embodiments, detection is performed by identifying a sequence of the at least one scaffold located within the heterologous polynucleotide segment described hereinabove.

[0069] According to certain embodiments, detection is performed by identifying at least one sequence specific probe that specifically hybridizes under stringent conditions to a nucleic acid sequence at least 70% homologous to any one of SEQ ID NOs:1-31 or a part thereof.

[0070] According to certain further exemplary embodiments, detection is performed by identifying the presence of the marker 2-3HS2 comprising a nucleic acid sequence at least 90% homologous to the nucleic acid sequence set forth in SEQ ID NO:34. According to some embodiments, the presence of the marker 2-3HS2 is identified using a pair of primers having the nucleic acid sequence set forth in SEQ ID NO:32 and SEQ ID NO:33.

[0071] According to certain embodiments, the plants are further selected to be devoid of the ph1 mutant gene.

[0072] According to yet additional aspect, the present invention provides a method for identifying and selecting wheat plants having enhanced resistance or tolerance to leaf rust and stripe diseases, comprising the steps of:
[0073] a. providing a plurality of wheat plants;
[0074] b. examining a nucleic acid sample obtained from each of the plurality of wheat plants for the presence of a heterologous polynucleotide segment comprising at least one scaffold at least 70% homologous to a nucleic acid sequence set forth in any one of SEQ ID NOs:1-31 or a part thereof; optionally
[0075] c. examining a nucleic acid sample obtained from each of the plurality of wheat plants for the presence of a 2-3HS2 marker having a nucleic acid sequence at least 90% homologous to the nucleic acid sequence set forth in SEQ ID NO:34; and
[0076] d. selecting wheat plants comprising the heterologous polynucleotide segment and/or the 2-3HS2 marker.

[0077] Identifying the heterologous polynucleotide segment and/or 2-3HS2 marker is performed as is known in the Art and as described hereinabove.

[0078] According to certain embodiments, the method further comprises inoculating the wheat plants comprising the heterologous polynucleotide segment with the respective fungus and selecting phenotypically resistant plants. According to certain exemplary embodiments, the inoculation and selection is performed at the seedling stage of the plants. The respective fungus is as described hereinabove.

[0079] According to yet further aspect, the present invention provides an isolated polynucleotide comprising at least one scaffold having a nucleic acid sequence at least 70% homologous to a nucleic acid sequence set forth in any one of SEQ ID NOs:1-31 or a part thereof, wherein the polynucleotide, when introduced into a wheat plant, confers or enhances resistance of the wheat plant to a leaf rust disease and strip rust disease. Each possibility represents a separate embodiment of the present invention.

[0080] According to certain embodiments, the isolated polynucleotide comprises at least one scaffold having a nucleic acid sequence at least 75%, at least 80%, at least 85%, at least 90% or at least 95% homologous to a nucleic acid sequence set forth in any one of SEQ ID NOs:1-31 or a part thereof. Each possibility represents a separate embodiment of the present invention.

[0081] According to certain embodiments, the isolated polynucleotide comprises at least one scaffold having the nucleic acid sequence set forth in any one of SEQ ID NOs:1-31 or a part thereof. Each possibility represents a separate embodiment of the present invention.

[0082] According to certain exemplary embodiments, the isolated polynucleotide comprises at least one scaffold at least 70% homologous a nucleic acid sequence set forth in any one of SEQ ID NO:1, SEQ ID NO:3, SEQ ID NO:31, SEQ ID NO:23, SEQ ID NO:2 or a part thereof. Each possibility represents a separate embodiment of the present invention.

[0083] According to certain embodiments, the isolated polynucleotide comprises at least one scaffold having a nucleic acid sequence at least 70%, at least 75%, at least 80%, at least 85%, at least 90% or at least 95% homologous to a nucleic acid sequence set forth in any one of SEQ ID NO:1, SEQ ID NO:3, SEQ ID NO:31, SEQ ID NO:23, SEQ ID NO:2 or a part thereof. Each possibility represents a separate embodiment of the present invention.

[0084] According to certain embodiments, the isolated polynucleotide comprises a scaffold at least 95% homologous to SEQ ID NO:1 or part thereof. According to some embodiments, the isolated polynucleotide comprises a scaffold having the nucleic acid sequence set forth in SEQ ID NO:1.

[0085] According to certain embodiments the isolated polynucleotide comprises a scaffold at least 95% homologous to SEQ ID NO:2 or a part thereof. According to some embodiments, the isolated polynucleotide comprises a scaffold having the nucleic acid sequence set forth in SEQ ID NO:2.

[0086] According to certain embodiments the isolated polynucleotide comprises a scaffold at least 95% homologous to SEQ ID NO:3 or a part thereof. According to some embodiments, the isolated polynucleotide comprises a scaffold having the nucleic acid sequence set forth in SEQ ID NO:3.

[0087] According to certain embodiments, the isolated polynucleotide comprises a scaffold at least 95% homologous to the nucleic acid sequence set forth in SEQ ID NO:31 or a part thereof. According to some embodiments, the isolated polynucleotide comprises a scaffold having the nucleic acid sequence set forth in SEQ ID NO:31.

[0088] According to certain embodiments, the isolated polynucleotide comprises a scaffold at least 95% homologous to the nucleic acid sequence set forth in SEQ ID NO:23 or a part thereof. According to some embodiments, the isolated polynucleotide comprises a scaffold having the nucleic acid sequence set forth in SEQ ID NO:23.

[0089] According to certain embodiments, the isolated polynucleotide comprises a fragment of chromosome 6S^{sh} of Ae. sharonensis Accession TH548, seed of which have been deposited with NCIMB Ltd. as the International Depositary Authority under Accession No. NCIMB 43567. According to certain embodiments, the isolated polynucleotide comprises a nucleic acid sequence present within Ae. sharonensis chromosome 6S^{sh} from about position of 34 Mbp to about position 62 Mbp.

[0090] According to certain embodiments, the isolated polynucleotide comprises a marker designated 2-3HS2, wherein the marker is amplified by a pair of primers comprising a forward primer comprising the nucleic acid sequence set forth in SEQ ID NO:32 and a reveres primer comprising the nucleic acid sequence set forth in SEQ ID NO:33.

[0091] According to certain exemplary embodiments, the marker comprises a nucleic acid sequence at least 90% homologous to SEQ ID NO:34. According to further certain exemplary embodiments, the marker comprises the nucleic acid sequence set forth in SEQ ID NO:34.

[0092] According to certain embodiments, the isolated polynucleotide is devoid of the nucleic acid sequence set forth in SEQ ID NO:35, SEQ ID NO:36, or a combination thereof.

[0093] According to additional aspect, the present invention provides a nucleic acid construct comprising the isolated polynucleotides according to some embodiments of the invention, further comprising at least one regulatory element for directing the expression of the polynucleotide within a plant cell. According to certain embodiment, the regulatory element is selected from the group consisting of a promoter, an enhancer and a translation terminator sequence. The regulatory element, particularly the promoter, can be endogenous or heterologous to the plant comprising the nucleic acid construct. According to certain exemplary embodiments, the plant is a wheat plant.

[0094] According to certain exemplary embodiments, leaf rust is caused by the fungus Puccinia triticina. According to certain typical embodiments, the leaf rust disease is caused by Puccinia triticina tritici. According to other embodiments, the stripe rust disease is caused by Puccinia striiformis. According to certain typical embodiments, the stripe rust is caused by Puccinia striiformis tritici.

[0095] According to yet further aspect, the present invention provides a pair of primers for identifying resistance or tolerance of a wheat plant to leaf rust and stripe rust diseases, the comprising one primer having the nucleic acid sequence set forth in SEQ ID NO:32 and additional primer having the nucleic acid sequence set forth in SEQ ID NO:33.

[0096] According to certain embodiments, the pair of primers amplify leaf rust and stripe rust-resistant marker having a nucleic acid sequence at least 90% homologous to SEQ ID NO:34. According to certain exemplary embodiments, the pair of primers amplify leaf rust and stripe rust-resistant marker having the nucleic acid sequence set forth in SEQ ID NO:34. It is to be understood that any combination of each of the aspects and the embodiments disclosed herein is explicitly encompassed within the disclosure of the present invention.

[0097] Other objects, features and advantages of the present invention will become clear from the following description and drawings.

### BRIEF DESCRIPTION OF THE FIGURES

[0098] FIG. 1 is a schematic presentation of the procedure for the derivation of secondary and tertiary recombinants. R and r denote for presence or absence of the alien resistance gene(s), respectively. Ph and ph denote for Ph1 and ph1b alleles, respectively. HP -homoeologous pairing. Percentage values are the calculated rate of Galil chromatin.

[0099] FIG. 2 shows (—)log P-value of Fisher Exact test conducted on SNPs between Ae. sharonensis and bread wheat in chromosome 6B (based on alignment to Chinese Spring (CS) genome). X-axis represents the position of each SNP (represented by circles) on CS genome. Y-axis is the (—)log P-value of Fisher Exact test. FIG. 2A: Total number of SNPs.

[0100] FIG. 2B: Zooming into the area of potential SNPs. SNPs with (—)log p>16 are boxed.

[0101] FIG. 3 shows gel electrophoresis representing all of the PCR markers used for assessment of the segment boundaries. Galil is the susceptible elite cultivar (lack of bands represents absence of the Ae. sharonensis segment). Line 42 is one of the primary recombinants that served as a positive control. R-6 is an example to a secondary recombinant with a shortened segment towards the long arm telomere, R-10 is an example to a secondary recombinant that recombined towards the short arm telomere.

[0102] FIG. 4 demonstrates the Chromosome 6B constitution according to the analysis with PCR markers 1-9 (Table 3). Wheat lines presented include 12 secondary recombinant lines (designated R-[No.]) , one tertiary recombinant line (P-37), with shorter alien segment than in the primary recombinant line 42, R-1018-8 line that was derived from the cross of R-10 and R-18, and R-1016-10 line that was derived from the cross of R-10 and R-16. Galil is the susceptible elite cultivar without the Ae. sharonensis segment. A segment spanning 0-140 Mb of recombinant chromosome 6B was divided into four regions restricted by markers. Symbols+ and − indicate presence and absence of the markers, respectively; dark gray and light gray colors represent presence or absence of Ae. sharonensis segment, respectively. The boxed (intermediate) region is the alien region present in all of the resistant recombinants. Regions I and II are left extensions (towards the short arm telomere); Regions III and IV are right extensions (towards the long arm telomere).

[0103] FIG. 5 shows frequency of occurrence of the PCR markers for assessment of the segment. Frequencies are calculated from 20 candidates that were screened with all of the markers.

[0104] FIG. 6 demonstrates the scale of reaction to field inoculation by spraying stripe rust isolate #5006. *VR=very resistant; R=resistant; MS=medium susceptible; S=susceptible; VS=very susceptible.

[0105] FIG. 7 shows the structure of a recombinant chromosome 6B.

### DETAILED DESCRIPTION OF THE INVENTION

[0106] The present invention discloses novel nucleic acid sequences that confer or enhance resistance of wheat plants to rust diseases, particularly leaf rust disease and strip rust disease, (the latter also known as yellow rust disease), which are caused by fungi of the species Puccinia. The invention further provides wheat plants comprising within the genome heterologous polynucleotide segment comprising the resistance-conferring nucleic acid sequence that show enhanced resistance or tolerance to the fungi, and methods of producing same. The present invention further provides markers for identifying resistance to leaf rust and stripe rust diseases.

### Definitions

[0107] The terms “comprise”, “comprising”, “includes”, “including”, “having” and their conjugates mean “including but not limited to”.

[0108] The term “consisting of” means “including and limited to”.

[0109] The term “consisting essentially of” means that the composition, method or structure may include additional ingredients, steps and/or parts, but only if the additional ingredients, steps and/or parts do not materially alter the basic and novel characteristics of the claimed composition, method or structure.

[0110] As used herein, the singular form “a”, “an” and “the” include plural references unless the context clearly dictates otherwise. For example, the term “a part” with reference to a polynucleotide may include a plurality of polynucleotide parts, including mixtures thereof.

[0111] The term “about” as used herein refers to a numeric value±10%.

[0112] Whenever a numerical range is indicated herein, it is meant to include any cited numeral (fractional or integral) within the indicated range. The phrases “from” a first indicate number and “to” a second indicate number are meant to include the first and second indicated numbers and all the fractional and integral numerals therebetween.

[0113] The term “plant” is used herein in its broadest sense. It also refers to a plurality of plant cells that are largely differentiated into a structure that is present at any stage of a plant's development. Such structures include, but are not limited to, a root, stem, shoot, leaf, flower, petal, fruit, etc. According to certain exemplary embodiments, the term “wheat plant” refers to Triticum turgidum subsp. durum (tetraploid wheat=macaroni wheat) and T. aestivum subsp. aestivum (hexaploid wheat=bread wheat=common wheat) of the tribe Triticeae, family Poaceae (Gramineae).

[0114] The term “cultivar” (abbreviation cv.) is used herein to denote a plant having a biological status other than a “wild” status, which “wild” status indicates the original non-cultivated or natural state of a plant or accession. The term “cultivar” (for cultivated plants) includes, but is not limited to, semi-natural, semi-wild, weedy, traditional cultivar, landrace, breeding material, research material, breeder's line, synthetic population, hybrid, founder stock/base population, inbred line (parent of hybrid cultivar), segregating population, mutant/genetic stock, and advanced/improved cultivar. The term as used herein includes registered as well as non-registered lines. Examples of cultivars include such cultivated varieties that belong to the species Triticum turgidum and Triticum aestivum, including, but not limited to, “Chinese Spring” (CS) and “Galil”.

[0115] The terms “Aegilops sharonensis” or “Ae. sharonensis” or “AES” are used herein interchangeably and relate to a wild type plant resistant to a disease caused by a fungus of the species Puccinia, particularly by Puccinia triticina and/or Puccinia striiformis. According to certain exemplary embodiments, the term refers to Ae. sharonensis accession TH548 that is resistant to both Puccinia triticina and Puccinia striiformis and is thus resistant to the leaf rust and stripe rust diseases. Seeds of Ae. sharonensis TH548 have been deposited by Ramot at Tel Aviv University Ltd. Israel, a co-manager of the Applicant of the present invention (Technology Innovation Momentum Fund (Israel) Limited Partnership) pursuant to and in satisfaction of the requirement of the Budapest Treaty on the International Recognition of the Deposit of Microorganisms for the Purpose of the Patent Procedure (“The Budapest Treaty”) with the National Collection of Industrial, Food and Marine Bacteria (NCIMB) (NCIMB Ltd, Ferguson Building, Craibstone Estate, Bucksburn, Aberdeen, AB21 9YA Scotland) on Jan. 31, 2020 under Accession No. NCIMB 43567. This accession is also available from the Harold and Adele Lieberman Germplasm Bank at the Institute for Cereal Crops Improvement, Tel Aviv University (http s://www.genesys-pgr.org/wiews/ISR003) under the number AE-548-4.

[0116] The terms “resistant” and “resistance” as used herein refer to the ability of a plant variety to restrict the growth and development of a specified pest or pathogen and/or the damage they cause when compared to susceptible plant varieties under similar environmental conditions and pest or pathogen pressure. The terms encompass both partial and full resistance to infection. A rust-resistant plant may either be fully resistant or have low levels of susceptibility to infection by the fungus Puccinia, particularly by Puccinia triticina, and/or Puccinia striiformis, more particularly by Puccinia triticina tritici and/or Puccinia striiformis tritici.

[0117] The terms “tolerant” and “tolerance” are used herein to indicate a phenotype of a plant wherein at least some of the disease-symptoms remain absent upon exposure of said plant to an infective dose of a pathogen, particularly fungi, whereby the presence of the pathogen can be established, at least under some culture conditions. Tolerant plants are therefore resistant for symptom expression but symptomless carriers of the pathogen, particularly the fungi.

[0118] The terms “susceptible” and “susceptibility” as used herein refer to the inability of a plant to restrict the growth and development of a specified pest or pathogen; a susceptible plant displays the detrimental symptoms linked to the pathogen infection, particularly fungi infection. A rust-susceptible wheat plant may be either non-resistant or have low levels of resistance to these fungi. Stripe rust (also designated yellow rust, caused by the fungus Puccinia striiformis) and leaf rust (caused by Puccinia triticina) are two devastating wheat diseases causing enormous annual yield losses. The fungal pathogens are changing frequently, giving rise to new virulent types and thus overcoming the currently deployed resistance genes. Consequently, the primary wheat gene pool is becoming exhausted and new resistance genes are required. Wild relatives of wheat are yet an untapped resistance gene pool.

[0119] Accordingly, “conferred resistance to rust disease(s)” or “enhanced resistance to a rust disease(s)” refer to a phenotype in which a plant, a wheat plant according to the present invention, has greater health, growth, multiplication, fertility, vigor, strength (e.g., stem strength and resistance), yield, or less severe symptoms associated with infection of the pathogenic fungus causing the rust disease compared to a wheat plant that does not have enhanced resistance to the pathogen. Where a plant is tested for resistance, a control plant is used to assess the degree of the plant resistance. According to certain embodiments of the present invention, the control plant is a plant not manipulated to comprise within its genome the resistance-conferring or enhancing polynucleotide segments of the invention. The control plant typically, but not necessarily, has the same genetic background as the examined plant. The enhancement can be manifested as an increase of 0.1%, 0.2%, 0.3%, 0.5%, 0.75%, 1%, 1.5%, 2%, 3%, 4%, 5%, 6%, 7%, 8%, 9%, 10%, 12%, 15%, 17%, 20%, 25%, 30%, 35%, 40%, 50%, 60%, 70%, 80%, 90%, 100%, or more in health, growth, multiplication, fertility, vigor, strength, or yield, as compared to a control plant. The enhancement can be a decrease of 0.1%, 0.2%, 0.3%, 0.5%, 0.75%, 1%, 1.5%, 2%, 3%, 4%, 5%, 6%, 7%, 8%, 9%, 10%, 12%, 15%, 17%, 20%, 25%, 30%, 35%, 40%, 50%, 60%, 70%, 80%, 90%, or 100% in the symptoms associated with the fungi infection as compared to the control plant. According to certain exemplary embodiments, the examined plant and the control plant are grown under the same conditions.

[0120] The term “locus” (plural “loci”) as used herein refers to any site that has been defined genetically. The locus can be a single position (nucleotide) or a chromosomal region. A locus may be a gene, a genetic determinant, or part of a gene, or a DNA sequence, and may be occupied by different sequences. A locus may also be defined by an SNP (Single Nucleotide Polymorphism), by several SNPs, or by two flanking SNPs. According to certain embodiments, locus is defined herein as the position that a given gene or genetic determinant occupies on a chromosome of a given species.

[0121] As used herein the term “polynucleotide” refers to a single or double stranded nucleic acid sequence which is isolated and provided in the form of an RNA sequence, a complementary polynucleotide sequence (cDNA), a DNA sequence and/or a composite polynucleotide sequences (e.g., a combination of the above).

[0122] As used herein the phrase “complementary polynucleotide sequence” refers to a sequence, which results from reverse transcription of messenger RNA using a reverse transcriptase or any other RNA dependent DNA polymerase. Such a sequence can be subsequently amplified in vivo or in vitro using a DNA dependent DNA polymerase.

[0123] As used herein the phrase “composite polynucleotide sequence” refers to a sequence, which is at least partially complementary and at least partially genomic. A composite sequence can include some exonal sequences required to encode the polypeptide of the present invention, as well as some intronic sequences interposing therebetween. The intronic sequences can be of any source, including of other genes, and typically will include conserved splicing signal sequences. Such intronic sequences may further include cis acting expression regulatory elements.

[0124] The term “isolated” refers to at least partially separated from the natural environment e.g., from a plant cell.

[0125] When reference is made to particular sequence listings, such reference is to be understood to also encompass sequences that substantially correspond to its complementary sequence as including minor sequence variations, resulting from, e.g., sequencing errors, cloning errors, or other alterations resulting in base substitution, base deletion or base addition, provided that the frequency of such variations is less than 1 in 50 nucleotides, alternatively, less than 1 in 100 nucleotides, alternatively, less than 1 in 200 nucleotides, alternatively, less than 1 in 500 nucleotides, alternatively, less than 1 in 1000 nucleotides, alternatively, less than 1 in 5,000 nucleotides, alternatively, less than 1 in 10,000 nucleotides.

[0126] The term “heterologous” with reference to a polynucleotide as is used herein refers to a sequence that is not naturally found in the plant, specifically the wheat plant, and has been artificially introduced into the plant.

[0127] The term “heterozygous” as is used herein means a genetic condition existing when different alleles (forms of a given gene, genetic determinant or sequences) reside at corresponding loci on homologous chromosomes.

[0128] The term “homozygous” as is used herein, means a genetic condition existing when identical alleles (forms of a given gene, genetic determinant or sequences) reside at corresponding loci on homologous chromosomes.

[0129] The terms “introgression” “introgressed” and “introgressing” refer to the translocation of a desired allele(s) (forms of a given gene, genetic determinant or sequences) from a genetic background of one species, variety or cultivar into the genome of another species, variety or cultivar. In one method, the desired allele(s) can be introgressed through a sexual cross between two parents, wherein one of the parents has the desired allele in its genome. The desired allele can include desired gene or genes, a marker locus, a QTL or the like.

[0130] The terms “genetic engineering”, “transformation” and “genetic modification” are all used herein for the transfer of isolated and cloned genes, genetic determinants or polynucleotides into the DNA, usually the chromosomal DNA or genome, of another plant, or to the modification of a gene within the plant genome.

[0131] As used herein, the term “plant part” typically refers to a part of the wheat plant, including single cells and cell tissues such as plant cells that are intact in plants, cell clumps and tissue cultures from which wheat plants can be regenerated. Examples of plant parts include, but are not limited to, single cells and tissues from pollen, ovules, leaves, embryos, roots, root tips, anthers, flowers, fruits, stems shoots, and seeds; as well as pollen, ovules, leaves, embryos, roots, root tips, anthers, flowers, fruits, stems, shoots, scions, rootstocks, seeds, protoplasts, calli, and the like.

[0132] As used herein, the term “population” refers to a genetically heterogeneous collection of plants sharing a common genetic derivation.

[0133] The term “linkage group” as used herein refers to all of the genes or genetic traits that are located on the same chromosome. Within the linkage group, those loci that are close enough together will exhibit linkage in genetic crosses. Since the probability of crossover increases with the physical distance between genes on a chromosome, genes whose locations are far remoted from each other within a linkage group may not exhibit any detectable linkage in direct genetic tests.

[0134] The term “marker” as used herein refers to a nucleic acid sequence the presence of which is indicative for a trait, particularly resistance to at least one of strip rust and leaf rust disease.

[0135] As used herein, the term “contig” refers to a set of overlapping DNA segments that together represent a consensus region of DNA.

[0136] As used herein, the term “scaffold” refers to the order and orientation of adjacent contigs connected together, which can be generally positioned on a target draft genome or a chromosome.

[0137] The present invention discloses hitherto unidentified sequences which, when present in the genome of a wheat plant confer or enhance the tolerance and/or resistance of the wheat plant to infection by Puccinia fungi, particularly Puccinia triticina and Puccinia striiformis causing leaf rust disease and stripe rust disease, respectively.

[0138] According to certain aspects, the present invention provides isolated polynucleotide comprising a nucleic acid sequence capable of conferring or enhancing resistance to a plant, particularly wheat plant, towards a disease cause by at least one fungus of the species Puccinia, particularly towards leaf rust disease and stripe rust disease.

[0139] According to certain embodiments, the isolated polynucleotide comprises at least one scaffold having a nucleic acid sequence at least 70% homologous to a nucleic acid sequence set forth in any one of SEQ ID NOs:1-31 or a part thereof. Each possibility represents a separate embodiment of the present invention.

[0140] The at least one scaffold or a combination of scaffold may include a single resistance/tolerance-conferring gene or a plurality of resistance/tolerance-conferring genes, typically two or three genes. According to some embodiments, the at least one scaffold comprises a single resistance/tolerance-conferring gene. According to some embodiments, the at least one scaffold comprises two resistance/tolerance-conferring genes. According to some embodiments, the at least one scaffold comprises three resistance/tolerance-conferring genes.

[0141] According to certain embodiments, the isolated polynucleotide comprises at least one scaffold having a nucleic acid sequence at about least 70%, at least about 71%, at least about 72%, at least about 73%, at least about 74%, at least about 75%, at least about 76%, at least about 77%, at least about 78%, at least about 79%, at least about 80%, at least about 81%, at least about 82%, at least about 83%, at least about 84%, at least about 85%, at least about 86%, at least about 87%, at least about 88%, at least about 89%, at least about 90%, at least about 91%, at least about 92%, at least about 93%, at least about 94%, at least about 95%, at least about 96%, at least about 97%, at least about 98%, at least about 99% or more homologous to, or identical to a polynucleotide having a nucleic acid sequence selected from the group consisting of SEQ ID NOs:1-31 and a part or parts thereof. Each possibility represents a separate embodiment of the present invention.

[0142] According to certain exemplary embodiments, the isolated polynucleotide comprises a scaffold having a nucleic acid sequence at least about 70%, at least about 71%, at least about 72%, at least about 73%, at least about 74%, at least about 75%, at least about 76%, at least about 77%, at least about 78%, at least about 79%, at least about 80%, at least about 81%, at least about 82%, at least about 83%, at least about 84%, at least about 85%, at least about 86%, at least about 87%, at least about 88%, at least about 89%, at least about 90%, at least about 91%, at least about 92%, at least about 93%, at least about 94%, at least about 95%, at least about 96%, at least about 97%, at least about 98%, at least about 99% or more homologous to, or identical to the nucleic acid sequence set forth in SEQ ID NO:1.

[0143] According to certain additional or alternative exemplary embodiments, the isolated polynucleotide comprises a scaffold having a nucleic acid sequence at least about 70%, at least about 71%, at least about 72%, at least about 73%, at least about 74%, at least about 75%, at least about 76%, at least about 77%, at least about 78%, at least about 79%, at least about 80%, at least about 81%, at least about 82%, at least about 83%, at least about 84%, at least about 85%, at least about 86%, at least about 87%, at least about 88%, at least about 89%, at least about 90%, at least about 91%, at least about 92%, at least about 93%, at least about 94%, at least about 95%, at least about 96%, at least about 97%, at least about 98%, at least about 99% or more homologous to, or identical to the nucleic acid sequence set forth in SEQ ID NO:2.

[0144] According to certain further additional or alternative exemplary embodiments, the isolated polynucleotide comprises a scaffold having a nucleic acid sequence at least about 70%, at least about 71%, at least about 72%, at least about 73%, at least about 74%, at least about 75%, at least about 76%, at least about 77%, at least about 78%, at least about 79%, at least about 80%, at least about 81%, at least about 82%, at least about 83%, at least about 84%, at least about 85%, at least about 86%, at least about 87%, at least about 88%, at least about 89%, at least about 90%, at least about 91%, at least about 92%, at least about 93%, at least about 94%, at least about 95%, at least about 96%, at least about 97%, at least about 98%, at least about 99% or more homologous to, or identical to the nucleic acid sequence set forth in SEQ ID NO:3.

[0145] According to certain further additional or alternative exemplary embodiments, the isolated polynucleotide comprises a scaffold having a nucleic acid sequence at least about 70%, at least about 71%, at least about 72%, at least about 73%, at least about 74%, at least about 75%, at least about 76%, at least about 77%, at least about 78%, at least about 79%, at least about 80%, at least about 81%, at least about 82%, at least about 83%, at least about 84%, at least about 85%, at least about 86%, at least about 87%, at least about 88%, at least about 89%, at least about 90%, at least about 91%, at least about 92%, at least about 93%, at least about 94%, at least about 95%, at least about 96%, at least about 97%, at least about 98%, at least about 99% or more homologous to, or identical to the nucleic acid sequence set forth in SEQ ID NO:23.

[0146] According to certain further additional or alternative exemplary embodiments, the isolated polynucleotide comprises a scaffold having a nucleic acid sequence at least about 70%, at least about 71%, at least about 72%, at least about 73%, at least about 74%, at least about 75%, at least about 76%, at least about 77%, at least about 78%, at least about 79%, at least about 80%, at least about 81%, at least about 82%, at least about 83%, at least about 84%, at least about 85%, at least about 86%, at least about 87%, at least about 88%, at least about 89%, at least about 90%, at least about 91%, at least about 92%, at least about 93%, at least about 94%, at least about 95%, at least about 96%, at least about 97%, at least about 98%, at least about 99% or more homologous to, or identical to the nucleic acid sequence set forth in SEQ ID NO:31.

[0147] As used herein, the terms “homology” or “homologous” when used in relation to nucleic acid sequences refers to a degree of similarity or identity between at least two nucleotide sequences. There may be partial homology or complete homology (i.e., identity). “Sequence identity” refers to a measure of relatedness between two or more nucleotide sequences, expressed as a percentage with reference to the total comparison length. The identity calculation takes into account those nucleotide residues that are identical and in the same relative positions in their respective sequences. A gap, i.e. a position in an alignment where a residue is present in one sequence but not in the other is regards as a position with non-identical residues. Identity (e.g., percent homology) can be determined using any homology comparison software, including for example, the BlastN software of the National Center of Biotechnology Information (NCBI) such as by using default parameters. A widely used and accepted computer program for performing sequence alignments is CLUSTALW v1.6 (Thompson, et al. Nucl. Acids Res., 22: 4673-4680, 1994).

[0148] According to some embodiments of the invention, the homology or identity is a global homology or identity, i.e., over the entire nucleic acid sequences of the invention and not over portions thereof.

[0149] According to some embodiments of the invention, the homology or identity is a partial homology or identity, i.e., over fragment or fragments of the nucleic acid sequences of the invention and not over portions thereof.

[0150] According to certain exemplary embodiments, the isolated polynucleotide comprises a nucleic acid sequence at least 80% homologous to at least one of the fragments of any one of SEQ ID NOs:1-31 described in Table 1.

[0151] According to some embodiments, the isolated polynucleotide comprises a nucleic acid sequence at least at least about 81%, at least about 82%, at least about 83%, at least about 84%, at least about 85%, at least about 86%, at least about 87%, at least about 88%, at least about 89%, at least about 90%, at least about 91%, at least about 92%, at least about 93%, at least about 94%, at least about 95%, at least about 96%, at least about 97%, at least about 98%, at least about 99% or more homologous to, or identical to at least one of the fragments of any one of SEQ ID NOs:1-31 described in Table 1.

TABLE 1
Scaffold fragments

| SEQ | | | |
|---|---|---|---|
| ID | No. of | | Scaffold fragments |
| NO. | Nucleotides | Scaffold | (nucleobase position from-to) |
| 1 | 28828 | 19799 | 291-330; 478-857; 959-1448; 1628-1732; |
| | | | 1841-6253; 6465-13113; 13149-14038; 14083-14950; |
| | | | 15038-15573; 15634-16457; 166552-16597; |
| | | | 16643-16659; 16835-17147; 17180-19854; |
| | | | 19945-20514; 20567-22596; 22633-27260; |
| 2 | 19882 | 20860 | 110-4174; 4896-7136; 7360-10600; |
| | | | 10643-10860; 10906-11092; 11137-14247; |
| | | | 14312-14653; 14772-15293; 15333-15543; |
| | | | 15579-16082; 16168-16851- |
| 3 | 26399 | 00757 | 1079-1094; 6459-7118; 7191-7931; 7954-12776; |
| | | | 12811-13080; 13183-13240; 13345-16855; |
| | | | 16914-19968; 20445-20575; 20758-22818; |
| | | | 23733-23919; |
| 4 | 64196 | 1540406 | 1; 738-826; 1239-1248; 2320-2399; 2436-2823; |
| | | | 2948-3405; 3491-4095; 4157-4174; 4239-7163; |
| | | | 7393-8012; 8563-9342; 9526-9531; 10062-10109; |
| | | | 10239-12334; 12507-12649; 12787-13385; |
| | | | 13498-14330; 14457-16953; 16994-18526; |
| | | | 18845-19628; 19692-20672; 20714-21774; |
| | | | 21818-23800; 23834-26244; 26291-26591; |
| | | | 26837-29509; 29542-29695; 29843-30051; |
| | | | 30214-30429; 32352-34537; 34557-35059; |
| | | | 35345-35698; 35878-36552; 36572-37427; |
| | | | 37584-37776; 37820-39948; 40034-43399; |
| | | | 43677-43877; 43929-44013; 44472-44751; |
| | | | 44782-44802; 46075-48084; 48124-48289; |
| | | | 48343-50459; 50486-52590; 54252-54350; |
| | | | 54447-54912; 55423-55925; 55992-56176; |
| | | | 56226-58359; 58559-58746; 58849-59139; |
| | | | 59184-59215; 59237-61628; 61731-62781; |
| | | | 62894-63768; 63886-63887; |
| 5 | 24799 | 1900261 | 1-2999; 5310-5678; 5892-5955; 6310-6330; |
| | | | 6758-7383; 7454-8049; 8126-9890; |
| | | | 10508-10768; 10931-11781; 11930-14726; |
| | | | 14787-14804; 15282-16578; 16610-17062; |
| | | | 17273-17354; 17546-21962; 22065-23900; |
| | | | 23941-24196; 24237-24799; |
| 6 | 29906 | 1933170 | 1-29906; |
| 7 | 16584 | 1531163 | 1-16584 |
| 8 | 61472 | 1927703 | 1-61472; |
| 9 | 16716 | 1895355 | 1-16716; |
| 10 | 45874 | 1931208 | 1-45874; |
| 11 | 100249 | 1935984 | 1-5; 5497-5501; 5522-5531; 6073-6713; 6927-7756; |
| | | | 9915-9930; 28825-29705; 29894-29900; |
| | | | 30929-31038; 31444-31823; 31878-33241; |
| | | | 33395-33553; 33585-33652; 33749-34056; |
| | | | 35840-35933; 36121-36363; 36890-37063; |
| | | | 42170-42188; 52442-53045; 56194-56201; |
| | | | 56343; 56706-59540; 60043-60051; |
| | | | 62750-62788; 63283-63291; 64905-67403; |
| | | | 67496-67561; 68325-68335; 69420-69794; |
| | | | 76649-76653; 79298-79382; 79461-79462; |
| | | | 82841-83677; 83797-83922; 84479-84639; |
| | | | 84764-85724; 85981-87197; 87232-87350; |
| | | | 88138-88314; 88788-88857; 89057-89507; |
| | | | 89549-90805; 90839-90897; 91155-91734; |
| | | | 92685-92859; 92988-93109; 96532-96533; |
| | | | 96584-96606; 98934-98942; |
| 12 | 35574 | 1913977 | 2165-2182; 2526-2904; 3074-3300; 3838-4205; |
| | | | 4269-7648; 7706-17555; 17677-17872; |
| | | | 17922-17932; 17987-18238; 18293-21369; |
| | | | 21550-21585; 21795-22226; 22277-22366; |
| | | | 22533-22705; 23199-23283; 23571-23920; |
| | | | 24003-27603; 27714-29575; 29677-31996; |
| | | | 32056-32117; 32150-32556; 32608-33024; |
| 13 | 13004 | 1916860 | 1-13004; |
| 14 | 32429 | 1891763 | 1-7; 325-2902; 2969-3595; 3695-5693; |
| | | | 5828-6622; 6652-6729; 6766-6992; 7049-7054; |
| | | | 7112-7816; 7853-7934; 7996-8297; 8334-13023; |
| | | | 13065-19478; 19511-20189; 20285-20694; |
| | | | 20797-21785; 21882-22196; 22299-22912; |
| | | | 22941-26167; 26219-26866; 26923-27449; |
| | | | 27572-27633; 27653-27795; 27987-28094; |
| | | | 28155-29348; 29433-30333; 30451-30522; |
| | | | 31135-31408; |
| 15 | 32664 | 1937448 | 1-32664; |
| 16 | 26451 | 1896571 | 1-26451; |
| 17 | 22991 | 1528020 | 148-1078; 1340-3164; 3837-5408; 5940-7548; |
| | | | 8003-8244; 8404-11132; 11235-11372; |
| | | | 12999-13467; 14827-14976; 15111-17245; |
| | | | 17352-20327; 22983-22991; |
| 18 | 23698 | 1935712 | 1-23698; |
| 19 | 27610 | 1893110 | 1-27610; |
| 20 | 53213 | 1898148 | 756-1849; 1975-2104; 2165-3864; 3909-4581; |
| | | | 4674-6767; 6797-6801; 7063-7254; 7281-7413; |
| | | | 7583-8860; 8900-9127; 9896-9919; 9981-9984; |
| | | | 10126-12906; 12955-13271; 13302-14855; |
| | | | 15680-15951; 22309-22597; 22820-23781; |
| | | | 24149-24537; 24635-24644; 25729-25860; |
| | | | 26057-27755; 27819-27940; 28006-29772; |
| | | | 30040-30066; 30096-30183; 30586-30760; |
| | | | 30837-33484; 33514-35133; 35173-42000; |
| | | | 42140-44771; 44810-45946; 45967-46403; |
| | | | 47444-47481; 47830-49800; 49849-50631; |
| | | | 50719-51126; 51215-53213; |
| 21 | 75783 | 1934541 | 1-1865; 1920-3105; 3630-3640; 4645-4688; |
| | | | 4898-5878; 6083-8787; 8831-10936; |
| | | | 11060-12461; 12510-12676; 12784-14882; |
| | | | 14956-15183; 17408; 23635-23733; 28519-28528; |
| | | | 29522-29608; 30124-30165; 34475-34524; |
| | | | 34587-34732; 37615-38233; 38797-39011; |
| | | | 41507-41520; 59519-59541; 59599-59755; |
| | | | 59881-62064; 66993-70274; 70398-71016; |
| | | | 71050-73615; |
| 22 | 15026 | 1538547 | 1-3102; 3153-8086; 8216-11267; 11387-11660; |
| | | | 12105-12415; 12604-14106; 14912-15026; |
| 23 | 4667 | 1549600 | 1-4667; |
| 24 | 28545 | 1872406 | 1-28545; |
| 25 | 34868 | 1889560 | 1-34868; |
| 26 | 17615 | 75951 | 341-478; 558-688; 1173-2112; 2176-4336; |
| | | | 4430-4743; 4767-6347; 6470-11080; 11123-11917; |
| | | | 11928-11991; 12171-12178; 12202-13713; |
| | | | 13813-14247; 14275-16857; 16934-17467; |
| | | | 17498-17615; |
| 27 | 29225 | 1893791 | 1-29225; |
| 28 | 15139 | 1892710 | 1-15139; |
| 29 | 22585 | 1926247 | 6069-8437; 8478-10521; 10599-11268; |
| | | | 11376-11542; 11738-11741; 11819-12311; |
| | | | 12331-15430; 15468-19621; 19679-19882; |
| | | | 20090-20447; 22274-22274; 22440-22585; |
| 30 | 20160 | 1929618 | 1; 547-617; 1260-2050; 2381-4139; 4250-5604; |
| | | | 5723-6202; 6278-6338; 6374-8991; 9101-9404; |
| | | | 9628-11264; 11300-17896; |
| 31 | 65001 | 1934717 | 3633-3650; 3837-4674; 7565-7586; 15846-15867; |
| | | | 18640-18641; 20604-20787; 27833-27848; |
| | | | 27887-29053; 30804-30908; 31365-32054; |
| | | | 32103-32855; 32902-33416; 33465-33475; |
| | | | 33499-33767; 33987-34455; 34498-35683; |
| | | | 35717-37244; 37382-37862; 37930-38200; |
| | | | 38345-40086; 40123-40773; 40943-40945; |
| | | | 41106-46396; 46433-46586; 46613-53816; |
| | | | 53888-54137; 54389-56432; 56905-57322; |
| | | | 57354-57889; 57921-57936; 57994-58975; |
| | | | 59142-61925; 61991-63602; 63625-65001; |

[0152] According to certain embodiments, the length of isolated polynucleotide is in the range of from about 5Kbp to about 28Mbp, from about 5Kbp to about 15Mbp, from about 5Kbp to about 13.6Mbp, from about 5Kbp to about 1Mbp, from about 20Kbp to about 28Mbp, from about 20Kbp to about 15Mbp, from about 20Kbp to about 13.6Mbp, from about 20Kbp to about 1Mbp, from about 50Kbp to about 28Mbp, from about 50Kbp to about 15Mbp, from about 50Kbp to about 13.6Mbp, from about 50Kbp to about 1Mbp. According to some embodiments, the length of the isolated polynucleotide is from about 5Kbp to about 1Mbp, from about 5Kbp to about 50 Kbp or from about 5Kbp to about 20Kbp. Each possibility represents a separate embodiment of the present invention.

[0153] According to certain embodiments, the isolated polynucleotide comprises a nucleic acid sequence of a fragment of chromosome 6S^{sh} of Aegilops sharonensis Accession TH548 described hereinabove. According to certain embodiments, the isolated polynucleotide comprises a nucleic acid sequence present within Ae. sharonensis chromosome 6S^{sh} from position 34 Mbp to position 62 Mbp. It is to be explicitly understood that the isolated polynucleotide of the present invention may include the entire fragment of chromosome Ae. sharonensis 6S^{sh} spanning from position 34 Mbp to position 62 Mbp or fragments thereof.

[0154] According to certain exemplary embodiments, the isolated polynucleotide comprises a marker designated 2-3HS2, wherein the marker is amplified by a pair of primers comprising a forward primer comprising the nucleic acid sequence set forth in SEQ ID NO:32 and a reveres primer comprising the nucleic acid sequence set forth in SEQ ID NO:33.

[0155] According to certain exemplary embodiments, the marker comprises a nucleic acid sequence at least 90% homologous to SEQ ID NO:34. According to further certain exemplary embodiments, the marker comprises a nucleic acid sequence at least about 91%, at least about 92%, at least about 93%, at least about 94%, at least about 95%, at least about 96%, at least about 97%, at least about 98%, at least about 99% or more homologous to, or identical to the nucleic acid sequence set forth in SEQ ID NO:34.

[0156] According to additional aspect, the present invention provides a nucleic acid construct comprising the isolated polynucleotide of the invention, further comprising at least one regulatory element for directing transcription of the nucleic acid sequence in the host plant cell.

[0157] According to certain embodiments, the regulatory element is selected from the group consisting of an enhancer, a promoter, a translation termination sequence and the like. According to some embodiments of the invention, the regulatory sequence is operably linked to the isolated polynucleotide.

[0158] A nucleic acid sequence (particularly a coding nucleic acid sequence) is “operably linked” to a regulatory sequence (e.g., promoter) if the regulatory sequence is capable of exerting a regulatory effect on the coding sequence linked thereto.

[0159] According to certain embodiments, the nucleic acid construct is an expression vector comprising a promoter operably linked to the polynucleotide of the invention.

[0160] As used herein, the term “promoter” refers to a region of DNA placed upstream of the transcriptional initiation site of a gene to which RNA polymerase binds to initiate transcription of RNA. The promoter controls where (e.g., which portion of a plant) and/or when (e.g., at which stage or condition in the lifetime of an organism or a cell thereof) the gene is expressed.

[0161] According to some embodiments of the invention, the promoter is heterologous to the isolated polynucleotide and/or to the host cell.

[0162] As used herein the phrase “heterologous promoter” refers to a promoter from a different species or from the same species but from a different gene locus as of the isolated polynucleotide sequence.

[0163] Any suitable promoter sequence can be used by the nucleic acid construct of the present invention. Preferably the promoter is selected from the group consisting of a constitutive promoter, a tissue-specific, or biotic-stress specific promoter, particularly promoters inducible by fungi infection. According to some embodiments of the invention, the promoter is a plant promoter suitable for expression of the isolated polynucleotide of the invention in a wheat plant cell.

[0164] Suitable promoters for use in wheat include, but are not limited to the promoter of wheat Lr67 gene (Moore, J., et al. 2015. Nat Genet 47, 1494-1498. Doi:10.1038/ng.3439; the promoter of wheat Lr21 gene (Huang 1 et al., 2003. Genetics 164(2):655-664); the promoter of wild wheat Yr36 gene (Fu D. et al., 2009. Science 323(5919):1357-1360. Doi:10.1126/science.1166289) and the constitutive cauliflower mosaic virus 35S promoter (Odell J T et al., Nature 313:810-812, 1985).

[0165] The nucleic acid construct of the present invention can further comprise at least one marker (reporter) gene, operably linked to a regulatory element (such as a promoter) that allows transformed cells containing the marker to be either recovered by negative selection (by inhibiting the growth of cells that do not contain the selectable marker gene), or by positive selection (by screening for the product encoded by the markers gene). Many commonly used selectable marker genes for plant transformation are known in the art, and include, for example, genes that code for enzymes that metabolically detoxify a selective chemical agent which may be an antibiotic or an herbicide, or genes that encode an altered target which is insensitive to the inhibitor. Several positive selection methods are known in the art, such as mannose selection. Alternatively, marker-less transformation can be used to obtain plants without mentioned marker genes, the techniques for which are known in the art.

[0166] The construct according to the present invention being a transformation vector, an expression vector or a combination thereof can be, for example, plasmid, a bacmid, a phagemid, a cosmid, a phage, a virus or an artificial chromosome.

[0167] The polynucleotides of the invention and construct comprising same can be chemically synthesized by any method as is known in the Art.

[0168] The nucleic acid construct comprising the polynucleotide conferring or enhancing resistance to rust diseases as disclosed herein may be used for the production of a wheat plant having enhanced resistance or tolerance to leaf rust disease and stripe rust disease.

[0169] According to certain embodiments, the resistance-conferring polynucleotide or the construct comprising same is introduced into a susceptible wheat plant, typically to a wheat cultivar used in agriculture.

[0170] The resistance conferring nucleic acid sequence may be introduced to a recipient wheat plant by any method as is known to a person skilled in the art. According to certain embodiments, the isolated polynucleotide or the construct comprising same according to the teachings of the invention can be introduced by transformation. Transformation is optionally followed by selection of offspring plants comprising the resistance-conferring sequence and exhibiting resistance to the fungal diseases stripe rust and leaf rust.

[0171] According to certain embodiments, the present invention provides a method for producing a wheat plant having enhanced resistance to leaf rust and strip rust diseases, the method comprises introducing into at least one cell of a wheat plant susceptible to the rust diseases a heterologous polynucleotide segment comprising at least one scaffold having a nucleic acid sequence at least 70% homologous to a nucleic acid sequence set forth in any one of SEQ ID NOs:1-31 or a part thereof, thereby producing a wheat plant having enhanced resistance to said rust diseases compared to a corresponding control plant.

[0172] The heterologous polynucleotide segment or a construct comprising same is as described hereinabove.

[0173] Methods for transforming a plant cell with nucleic acids sequences according to the present invention are known in the art. As used herein the term “transformation” or “transforming” describes a process by which a foreign nucleic acid sequence, such as a vector, enters and changes a recipient cell into a transformed, genetically modified or transgenic cell. Transformation may be stable, wherein the nucleic acid sequence is integrated into the plant genome and as such represents a stable and inherited trait, or transient, wherein the nucleic acid sequence is expressed by the cell transformed but is not integrated into the genome, and as such represents a transient trait. According to typical embodiments the nucleic acid sequences of the present invention are stably transformed into a plant cell.

[0174] There are various methods of introducing foreign nucleic acid sequences into both monocotyledonous and dicotyledonous plants (for example, Potrykus I. 1991. Annu Rev Plant Physiol Plant Mol Biol 42:205-225; Shimamoto K. et al., 1989. Nature 338:274-276).

[0175] The principal methods of the stable integration of exogenous DNA into plant genomic DNA includes two main approaches:

[0176] Agrobacterium-mediated gene transfer: The Agrobacterium-mediated system includes the use of plasmid vectors that contain defined DNA segments which integrate into the plant genomic DNA. Methods of inoculation of the plant tissue vary depending upon the plant species and the Agrobacterium delivery system. A widely used approach is the leaf-disc procedure, which can be performed with any tissue explant that provides a good source for initiation of whole-plant differentiation (Horsch et al., 1988. Plant Molecular Biology Manual A5, 1-9, Kluwer Academic Publishers, Dordrecht). A supplementary approach employs the Agrobacterium delivery system in combination with vacuum infiltration. Agrobacterium mediated transformation protocols for wheat are known to a person skilled in the art. High efficiency wheat transformation mediated by Agrobacterium tumefaciens is described by Ishida et al. (Ishida Y., et al. In: Ogihara Y., Takumi S., Handa H. (eds) Advances in Wheat Genetics: From Genome to Field.

[0177] Springer, Tokyo. DOI 10.1007/978-4-431-55675-6 18).Direct nucleic acid transfer: There are various methods of direct nucleic acid transfer into plant cells. In electroporation, protoplasts are briefly exposed to a strong electric field, opening up mini-pores to allow DNA to enter. In microinjection, the nucleic acid is mechanically injected directly into the cells using micropipettes. In microparticle bombardment, the nucleic acid is adsorbed on microprojectiles such as magnesium sulfate crystals or tungsten particles, and the microprojectiles are physically accelerated into cells or plant tissues. Another method for introducing nucleic acids to plants is via the sonication of target cells. Alternatively, liposome or spheroplast fusion has been used to introduce expression vectors into plants.

[0178] Following transformation of wheat target tissues, expression of the above described selectable marker genes allows for preferential selection of transformed cells, tissues and/or plants, using regeneration and selection methods now well known in the art.

[0179] According to other embodiments, the resistance conferring polynucleotides of the present invention can be introduced into the genome of a susceptible wheat cultivar using the techniques of genome editing. These techniques are particularly useful for introducing the resistance-conferring polynucleotide into a pre-determined location within chromosome 6B of the susceptible wheat.

[0180] Genome editing is a reverse genetics method which uses artificially engineered nucleases to cut and create specific double-stranded breaks at a desired location(s) in the genome, which are then repaired by cellular endogenous processes such as, homology directed repair (HDR) and non-homologous end-joining (NHEJ). NHEJ directly joins the DNA ends in a double-stranded break, while HDR utilizes a homologous sequence as a template for regenerating the missing DNA sequence at the break point. In order to introduce specific nucleotide modifications to the genomic DNA, a DNA repair template containing the desired sequence must be present during HDR. Genome editing cannot be performed using traditional restriction endonucleases since most restriction enzymes recognize a few base pairs on the DNA as their target and the probability is very high that the recognized base pair combination will be found in many locations across the genome resulting in multiple cuts not limited to a desired location. To overcome this challenge and create site-specific single- or double-stranded breaks, several distinct classes of nucleases have been discovered and bioengineered to date. These include the meganucleases, Zinc finger nucleases (ZFNs), transcription-activator like effector nucleases (TALENs) and CRISPR/Cas system.

[0181] As described hereinabove, the nucleic acids sequences conferring or enhancing resistance to the rust diseases according to the teachings of the present invention have been discovered by the inventors of the present invention on a fragment of chromosome 6S^{sh} of Aegilops sharonensis Accession TH548 spanning from position 34 Mbp to position 62 Mbp.

[0182] Thus, according to alternative embodiments, the resistance-conferring polynucleotide may be translocated without prior isolation from the resistant Ae.

[0183] sharonensis plant, by introgression of the Ae. sharonensis chromosome fragment into a wheat plant, preferably into wheat cultivar used for agricultural commercial growth.

[0184] The Ae. sharonensis chromosome fragment is as described hereinabove.

[0185] Plants resistant to leaf rust and strip rust disease can be selected by examining the presence of nucleic acid sequences of the at least one scaffold and/or markers as described herein above.

[0186] According to certain aspects, the present invention provides a wheat plant comprising in its genome a heterologous polynucleotide segment conferring or enhancing resistance of the wheat plant to leaf rust and stripe rust diseases, wherein the heterologous polynucleotide segment comprises at least one scaffold having a nucleic acid sequence at least 70% homologous to a nucleic acid sequence set forth in any one of SEQ ID NOs:1-31 or a part thereof. Each possibility represents a separate embodiment of the present invention.

[0187] The heterologous polynucleotide segment and its origin is as described hereinabove.

[0188] According to yet additional aspect, the present invention provides a method for identifying and selecting wheat plants having enhanced resistance to leaf rust and stripe resistance, comprising the steps of:
[0189] a. providing a plurality of wheat plants;
[0190] b. examining a nucleic acid sample obtained from each of the plurality of wheat plant for the presence of a heterologous polynucleotide segment comprising at least one scaffold at least 70% homologous to a nucleic acid sequence set forth in any one of SEQ ID NOs:1-31or a part thereof; optionally
[0191] c. examining a nucleic acid sample obtained from each of the plurality of wheat plant for the presence of a marker having the nucleic acid sequence set forth in SEQ ID NO:34; and

[0192] selecting wheat plants comprising the heterologous polynucleotide segment.

[0193] This method can be defined as “a marker assisted selection” as the selection of the desired resistant phenotype is performed using nucleic acid markers specific for the resistance-conferring nucleic acid sequence. Such marker assisted selection is of particular advantage, enabling selecting resistant platelets at commercial breeding.

[0194] According to certain exemplary embodiments, the step of examining a nucleic acid sample obtained from each of the plurality of wheat plants for the presence of the resistance-conferring or enhancing polynucleotide comprise the use of a set of bi-directional primers. Bi-directional means that the orientation of the primers is such that one functions as the forward and one as the reverse primer in an amplification reaction of nucleic acid. The bi-directional primers are typically used in an amplification reaction on genomic DNA that amplifies a unique nucleic acid sequence of the resistance-conferring or enhancing polynucleotide or a marker thereof but that does not amplify wild type sequences. According to certain embodiments, the pair of primers is designed to amplify the marker 2-3HS2 comprising the nucleic acid sequence set forth in SEQ ID NO:34. According to certain exemplary embodiments, the marker 2-3HS2 is amplified by a pair of primer comprising the nucleic acid sequence set forth in SEQ ID NO:32 and SEQ ID NO:33.

[0195] Additionally, or alternatively, the markers are sequence specific probes that specifically hybridize under stringent conditions to a nucleic acid sequence at least 70% homologous to any one of SEQ ID NOs:1-31 or a part thereof, but not to a nucleic acids isolated from wheat plant susceptible to leaf rust and/or stripe rust disease, and that can be detected thereafter by various methods as are well known to a person skilled in the art.

[0196] Nevertheless, it is to be explicitly understood that the method aspects of the invention are not limited to the use of the markers identified herein, and that methods of the present invention may also make use of markers not explicitly disclosed herein or even yet to be identified, as identifying and using such markers is well within the skills of a person with knowledge in the Art.

[0197] In an additional or alternative method, each of the plurality of the wheat plant is phenotypically examined for tolerance or resistance to infection by Puccinia fungi causing leaf rust or strip rust disease as exemplifies hereinbelow.

[0198] The following examples are presented in order to more fully illustrate some embodiments of the invention. They should, in no way be construed, however, as limiting the broad scope of the invention. One skilled in the art can readily devise many variations and modifications of the principles disclosed herein without departing from the scope of the invention.

### Examples

[0199] Materials and Methods

[0200] Plant Material

[0201] The rust resistant primary recombinants were produced using phib induction of homoeologous pairing between wheat cv. Chinese Spring and Aegilops sharonensis (Sharon goatgrass) chromosomes followed by backcrossing to the recurrent wheat parent cv. Galil (Millet et al. 2014. Genome 57: 309-316. dx.doi.org/10.1139/gen-2014-0004). Ae. sharonensis accession TH548, seed of which have been deposited with NCIMB Ltd. as the International Depositary Authority under Accession No. NCIMB 43567 was used. The recombinant source lines used in the present invention and their 6B chromosome constitution are presented in Table 2.

[0202] The homoeologous pairing ph1b mutant (HP) in the genetic background of cv. Chinese Spring (CS) was originally obtained from the late E.R. Sears.

[0203] Wheat cv. Galil is an elite Israeli spring wheat cultivar bred by Hazera Seed of Growth (Israel). This cultivar possesses the leaf rust resistance Lr26 and stripe rust resistance Yr19 genes, but is susceptible to the leaf and the stripe rust isolates that were used in this research.

TABLE 2
Source lines for the production of secondary recombinant plants

| Primary recombinant lines | | Selected BC₁ | | Number of |
|---|---|---|---|---|
| | Introgression size | (to the HP mutant) | | Fl seed |
| Line | on chromosome | Inoculating | Infection | (BC₁ crossed |
| designation | 6B* (cM) | pathogen | Type (IT)** | with Galil)*** |
| RY-32-3-3 | 30 (7)-107 (120) | Leaf rust | 1 | 44 |
| RL-17-6-10 | 33 (7)-107 (120) | Leaf rust | 1 | 380 |
| RY-41-1-14 | 30 (7)-107 (120) | Leaf rust | 1 | 136 |
| RY-32-3-14 | 33 (13)-87 | Leaf rust | 3-5 | 33 |
| RY-14-1-7 | 38-87 | Leaf rust | 1 | 37 |
| RY-32-3-3 | 30 (7)-107 (120) | Stripe rust | 1 | 116 |
| RL-17-6-10 | 33 (7)-107 (120) | Stripe rust | 1 | 234 |
| RY-32-3-14 | 33 (13)-87 | Stripe rust | 1 | 362 |
| RY-14-1-7 | 38-87 | Stripe rust | 1 | 58 |

*Numbers are based on presence of Ae. sharonensis DArT markers or absence of wheat markers. Numbers in brackets are based on absence of Galil markers in the recombinant line and in CS (Millet et al. 2014, ibid). RY and RL denote for resistance to stripe rust or to leaf rust, respectively, by which these lines were first selected.
**IT values were converted into 1 (resistant) to 9 (susceptible) scale as follows: IT = 1 (0/0; /0; −l−/1− −1/1−1+), IT = 3 (1+/1−2/2), IT = 5 (2−2+), IT = 7 (2−3−/2, 3−/2, 3), IT = 9 (3−/3/3+). Numbers in parenthesis indicate scores determined based on visual evaluation of fungal coverage and sporulation.
***Reflects apparent heterozygous secondary recombinant 6B chromosome

[0204] Pathogens

[0205] Leaf rust isolate #526-24 and stripe rust isolate #5006 from the stocks of the Institute for Cereal Crops Improvement were used. The virulence/avirulence (V/Av) formulae of these isolates are Lr1,3,24,26,10,18,21,23,15/Lr2a,2c,9,16,3ka,11,17,30 and Yr6,7,8,9,11,12,17,19,sk,18,A/Yr1,5,10,15,24,26,sp, for isolate #526-24 and #5006, respectively. Both of these isolates were used to select resistant progenies at seedling stage and to evaluate adult plant resistance. Both isolates are virulent to Galil and represent highly virulent pathogen races.

[0206] Inoculation and Disease Evaluation

[0207] Seedling Stage

[0208] Seedlings of each generation were tested and selected for sensitivity to leaf and/or stripe rust. Plants were grown in small pots in a temperature-controlled greenhouse at 22±2° C. Seven to 10 days-old seedlings were inoculated by spraying to runoff with about 1 mg of urediniospores suspended in 800 μl of lightweight mineral oil Soltrol® 170Isoparaffin (ChevronPhillips). After evaporation of the oil, the leaf rust-inoculated plants were maintained in a dew chamber at 18° C. for 24 h and then moved to a greenhouse. Stripe rust-inoculated plants were maintained in a dew chamber having a temperature of 9° C. for 16 h in the dark followed by 15° C. in light and then moved to a growth chamber having a temperature of 15° C. and 12 h light/12 h dark regime. Symptoms were scored 10-12 days post inoculation for infection type (IT) on a standard 0-4 scale. ITs of 0-2 were considered indicative of a resistant response and 3-4 as a susceptible response.

[0209] Adult Plants

[0210] Leaf Rust (Plant Grown in Greenhouse)

[0211] Single homozygous BC₄F₄ primary- and BC₂F₄ secondary-recombinant plants were grown in 5 L pots placed in a cooled greenhouse and sprayed with urodiniospores at the seventh leaf stage (stem elongation, stage 3 - Zadoks scale, Zadoks J C et al. 1974. Weed Research 14: 415-421). Four groups of plants, each containing two pots for each genotype, were inoculated similarly to the seedling inoculation. Disease level was evaluated after spike emergence, about 3 weeks post inoculation.

[0212] Stripe Rust (Plant Grown in the Field)

[0213] Seeds of the same primary and secondary recombinants that were used in seedling assays were planted in nursery plots under field conditions. Each plot (single genotype) consisted of four 1m rows 20 cm apart and a single margin row 40 cm apart of the spreader cv. Falchetto. The Falchetto plants were inoculated with urediniospores six times between January 14 (when the Falchetto plants were at seventh leaf stage) to February 5, by either brushing the upper leaves with a bundle of highly infected leaves, or by dusting the plants with a mixture of urediniospores and talc using a manual air pump. High humidity and cool nights prevailed in the experimental area during this period.

[0214] Disease level was measured with each nursery plot being evaluated as a whole unit, by % of rust coverage and general reaction (Susceptible—Intermediate— Resistant). An example of reaction is demonstrated in FIG. 6.

[0215] Shortening the Alien Segment

[0216] Secondary recombinants (SR) with shortened alien segment were obtained by induction of homoeologous recombination in hybrids between the primary recombinants and the wheat cv. Galil, followed by phenotyping and molecular selection as depicted in FIG. 1 and FIG. 7. Briefly, selected primary recombinants with different sizes of alien introgression on chromosome 6B (Table 2) were pollinated by the HP mutant and the F₁ offspring were backcrossed to the HP mutant. Rust resistant plants that were homozygous for ph1b were selected and pollinated by Galil. The resulting hybrids, were screened for reaction to both pathogens and 6B chromosome constitution of resistant plants was determined using molecular markers (using PCR markers as described in Table 3 and Example 1 hereinbelow). Plants with reduced size of the alien segment compared to the fragment size in parental primary recombinants were selected and allowed to self-pollinate. Selected rust resistant F₂ plants were characterized for their Ph1 genotype. Ph1/− were considered secondary recombinants, while homozygous ph1b were allowed for another recombination event. Both groups of plants were pollinated by Galil to produce BC₁ progeny. Chromosome 6B of BC₁ plants of the latter group was molecularly analyzed with the PCR markers and one tertiary recombinant was obtained. All of the rust resistant BC₁ recombinants were backcrossed again to Galil. BC₂ plants that were resistant to the leaf and stripe rust isolates were self-pollinated. Resistant BC₂F₂ progeny of each recombinant that are also homozygous for the SR 6B chromosome were selected as described hereinbelow. BC₂F₃ seeds of these plants were pooled and used for seed propagation in the greenhouse.

[0217] Further Shortening of the Segment

[0218] The recombinant line R-10, in which the alien chromatin extended towards the telomere of the long chromosome arm (right extension; FIG. 7, type a) and line R-18 in which the alien chromatin extended towards the telomere of the short chromosome arm (left extension; FIG. 7, type b) were crossed aiming to curtail the extensions towards the telomeres while maintaining the alien region around the resistance (FIG. 7, tertiary recombinant). The hybrids were pollinated by Galil and their desired offspring were selected using the PCR markers (Table 3).

[0219] Molecular Characterization of the Alien Segment

[0220] DNA Extraction

[0221] Leaves were collected and stored at −80° C. Frozen leaf samples (50 mg) were freeze-dried using Lyophilizer (Blue Wave, BW-10-ORD) for 16 h, and grinded for 1 min at 1,500 rpm, using two ⅛″ and one 3/16″ stainless steel beads in a Tissue-lyser (GenoGrinder). DNA was extracted using E-Z 96 Plant DNA Kit (Omega) (for PCR analysis), or using DNeasy Plant mini kit (Qiagen) (for GBS), according to manufacturer instructions.

[0222] Selection of ph1b Mutants

[0223] The presence of the Ph1 allele was detected by marker PSR2120, amplified by a forward primer having SEQ ID NO:19 and reverse primer having SEQ ID NO:20 (Table 3) according to Qu et al. (Qu L I et al. 1998. Theor Appl Genet 96:371-375). Plants deficient for the corresponding band were considered as ph1b/ph1b mutants.

[0224] Genotyping by Sequencing (GBS)

[0225] GBS was performed on 100 samples comprised of cv. Galil, the HP mutant, and 74 resistant and 24 susceptible secondary recombinant F₁ plants (FIG. 1), most of which were derived from the primary recombinant line RY 32-3-14 (Table 2). DNA was isolated from leaves of young plants (one month old) as described above. Sequencing was performed according to a modified Restriction site Associated DNA Sequencing (RAD-Seq) method (Elshire R J et al. 2011. PLoS One 6, e19379) at AgriLife Genomics (Texas). Briefly, genomic DNA was digested with the restriction enzyme PstI and approximately 110 bp were sequenced from both sides of the fragments. For sequencing, single end V4 chemistry with 125 bp kit were used on Illumuna Hiseq 2500 resulting in 40 M reads per sample of Galil and the HP mutant, and 8 M-10 M reads per sample for the rest of the recombinants. Raw data were analyzed by NRGene (nrgene.com/, Israel), using the newly assembled wild emmer ‘Zavitan’ genome (Avni R et al. 2017. Science 357:93-97) as a reference.

[0226] Development of Molecular Markers for the Alien Segment

[0227] According to the frequency of recombination events, single nucleotide polymorphisms (SNPs) between Ae. sharonensis and wheat sequences were mapped along the introgression region. Based on the SNPs, nine PCR primers were designed following the instructions mentioned at Ayyadevara et al. (Ayyadevara S et al. 2000. Anal Biochem 284:11-18). The primers for the marker amplification are described in Table 3 hereinbelow. An online available database was used to check for repetitive elements within the markers (wheat.pw.usda.gov/ITMI/Repeats/blastrepeats3.html).

[0228] Conversion from the wild emmer map sequence to CS map sequence and SNPs detection was accomplished as follows: raw reads were de-multiplexed using GBSX (Herten K et al. 2015. BMC bioinformatics 16:73). Reads of each genotype were aligned to chromosome 6B of the CS reference genome using Burrows-Wheeler Aligner (BWA) (Li H and Durbin R. 2009. Bioinformatics 25:1754-1760). Sequence Alignment/Map (SAM) tools (Li H. 2011. Bioinformatics 27:2987-2993) were used to pileup the individual alignment files into one pileup file that was used by BCFtools CALL (samtools.github.io/bcftools/) to call the SNPs. VariantAnnotation R package (Obenchain V et al. 2014. Bioinformatics 30:2076-2078) was used to read the SNP data into R environment. For each SNP a Fisher Exact test was conducted using a 2×2 contingency table of resistant and susceptible genotypes against the origin of the SNP allele (CS as “reference” SNP or the alien “alternative”). -log P-values of the Fisher test were plotted against the position of the corresponding SNP. Higher -log P-values (i.e. lower P-values) indicated the probability of the SNPs-resistance association to be non-random. SNPs with -log P>16, were assumed to be associated with the resistance locus.

[0229] Table 3 hereinbelow presents PCR markers for mapping the Ae. sharonensis alien segment. In all markers, which are based on SNPs, the polymorphic nucleotides are marked in bold and underline. Markers 1-7 were used to characterize the length of the segment. Markers 8-9 were used for detection of the critical area for the resistance. Marker 10 was used for selection of ph1b/ph1b lines. Markers 11-12 were used simultaneously for selection of plants homozygous for the segment (plants in which marker 11 was present and marker 12 was absent were selected). Temperature cycling consisted of 95° C. for 5 min, followed by 32 cycles of 95° C. for 30 sec; annealing at a temperature depending on the Taq enzyme used for 30 sec; 72° C. for 30 sec; and a final extension step at 72° C. for 5 min.

TABLE 3
PCR markers

| | | | | Marker | |
|---|---|---|---|---|---|
| Marker | Marker | Primer (5′-3′)* | | size | |
| No. | Name | Forward | Reverse | (bp) | Marker Sequence |
| 1 | 2-3HS2 | CAAACACCACAACAG | CAGCCCGAAGGAAAACA | 154 | CAAACACCACAACAGCTATGTCTTCAACTCGCTGCAG |
| | | CTATG | AT | | CCCTCTGCTTCACCCCCGCTACAGTCTATCCAGGAAG |
| | | (SEQ ID NO: 32) | (SEQ ID NO: 33) | | ATGCGCGCCTCTGGGGTAGGGCAAGAGCCAAAGGAAT |
| | | | | | GAATATGCTTCCGAGAGTTAGGCCATTGTTTTCCTTC |
| | | | | | GGGCTG |
| | | | | | (SEQ ID NO: 34) |
| 2 | 2-3HS3 | CAATTGGCATAAGAG | CAATTGGCATAAGAGCC | 144 | CAATTGGCATAAGAGCCTTGTCGATCCGAGGCGACTG |
| | | CCTT | TT | | TGGCGGTGCGGCGGACTCCATGTGAAGGGGACGTCAG |
| | | (SEQ ID NO: 37) | (SEQ ID NO: 38) | | CGGCGAAAGGTGGACGCCGTTGGCGGCGCGATGCTGC |
| | | | | | TAGCGGTGGGTGTGTGTCTTCATCATCGTCGAG |
| | | | | | (SEQ ID NO: 39) |
| 3 | 1C | GGCCAGTGCAATAAA | ATTTGTAGTAAGAGTGC | 214 | GGCCAGTGCAATAAACTAATAACACAAATCTAATTAG |
| | | CT | G | | TGCCAAAACTAGAACGAAATAAAATTATCTTTGTGCA |
| | | (SEQ ID NO: 40) | (SEQ ID NO: 41) | | TGCCCTCATTGCCGTGAAAGGGGCAGCAAATTAGCTG |
| | | | | | CAGTATCTCATGCGTACACCATGTTCTTTGTAGTAAA |
| | | | | | TCAGGAAGAAACATGCAAAACCCACGAATTACTCAAC |
| | | | | | ACTAAGCATGCCGCACTCTTACTACAAAT |
| | | | | | (SEQ ID NO: 42) |
| 4 | 2S1 | AAAAGAAAGTTGGCC | CGGCATGATTAAAACAT | 128 | AAAAGAAAGTTGGCCCCGAAATGTAACTGCATGCAGG |
| | | CCG | GAGGCAA | | ATGTATGGTTTATGATGTTGATGAAGGATGGAATACA |
| | | (SEQ ID NO: 43) | (SEQ ID NO: 44) | | CCACACCATGGGGGGCGATGTTTGAGAGCCTTGCCTC |
| | | | | | ATGTTTTAATCATGCCG |
| | | | | | (SEQ ID NO: 45) |
| 5 | 2S2 | TCATCGATGGGATCG | ATGTCCACCTGTCCCAA | 209 | TCATCGATGGGATCGACCATGAGGTGCAAAGGGAAGA |
| | | AC | G | | AGAGACTGGATGCTTCAGGCTATGGGTATGGATGGAT |
| | | (SEQ ID NO: 46) | (SEQ ID NO: 47) | | GCAGTACAGAAGCTCAAGACGAGAGGCGTGCTGCATG |
| | | | | | CAGCTTGAGGAGCCACGGGAGAGGGGCTCGCCCGGGA |
| | | | | | TGCATTTCCTTGAGCTCAACATCCTCAAGGAGGTGCC |
| | | | | | GCAACGCTTGGGACAGGTGGACAT |
| | | | | | (SEQ ID NO: 48) |
| 6 | 3S1 | ATCCTATCGCTCAAC | ACAGTTAGCTTGGCTTC | 147 | ATCCTATCGCTCAACATGTTCTGGTTCACTTTTTTAG |
| | | ATG | A | | ATGAAGATGGGAATAACCTGCTTAACATCTTCTGGTT |
| | | (SEQ ID NO: 49) | (SEQ ID NO: 50) | | CACTTTTGTAGATGAATATGGGAATAACCTGCATGCA |
| | | | | | GTCACGGGAATGGAGTGATGAAGCCAAGCTAACTGT |
| | | | | | (SEQ ID NO: 51) |
| 8 | 3S4 | GCTGCGTAAAATTAA | CTTTTAGTCAATTCTTG | 180 | GCTGCGTAAAATTAAGCATTATGAACAAGCAATCAGG |
| | | GCA | GTC | | CGGATTTTTAGGGATAATTCACTAATGTGGTTAACTT |
| | | (SEQ ID NO: 52) | (SEQ ID NO: 53) | | ATTTCTAGTAATGTAGAAGGTTCAACTTTTGACTGCA |
| | | | | | TGCAGAACCAAATAGCTCTAGGTGACAGACCAGAGAT |
| | | | | | CCCATAAGTTACGACCAAGAATTGACTAAAAG |
| | | | | | (SEQ ID NO: 54) |
| 9 | 4C | CTCAATCATTTCCGT | CTACGCAACAAGGAAAA | 191 | CTCAATCATTTCCGTCTACTCCTACGCAATCGTGCGA |
| | | CTAC | CA | | CGCTTCTGAAGAATATGAAAAATATGGTGTGGATCTT |
| | | (SEQ ID NO: 55) | (SEQ ID NO: 56) | | CTGAAATCCGAAGCTTCACTGCAGTACTTATGCAACC |
| | | | | | TACCACCTCATAGGTCTGCTTTACGTTACTAAAATTG |
| | | | | | GCGAAGACTTGTGATTCTGCATTGTGTTTTCCTTGTT |
| | | | | | GCGTAG |
| | | | | | (SEQ ID NO: 57) |
| 10 | PSR2120 | TTAACGCCAGGGCAT | CTGCAGGAGGCGCTGGA | 232 | Qu et al. (1998) |
| | | ACTC | | | |
| | | (SEQ ID NO: 58) | (SEQ ID NO: 59) | | |
| 11 | Zyg_1Sh_1 | CAAACACCACAACAG | CAGCCCGAAGGAAAACA | 154 | SEQ ID NO: 34 |
| | | CTATG | AT | | |
| | | (SEQ ID NO: 32) | (SEQ ID NO: 33) | | |
| 12 | Zyg_2G_2 | CAATTGGCATAAGAG | CATAGCCATCACCACCT | 219 | CAATTGGCATAAGAGCCTTGTCGATCCGAGGCGACTG |
| | | CCTG | TG | | TGGCGGTGCGGCGGACTCCATGTGAAGGGGACGTCAG |
| | | (SEQ ID NO: 60) | (SEQ ID NO: 61) | | CGGCGAAAGGTGGACGCCGTTGGCGGCGCGATGCTGC |
| | | | | | TAGCGGTGGGTGTGTGTCTTCATCATCGTCGAGCTGC |
| | | | | | ATCACGAGCGATGGAGAGAGATGTGCTGCTCGGTAAG |
| | | | | | TTGTGGCACCGGCGGCAAGGTGGTGATGGCTATG |
| | | | | | SEQ ID NO: 62 |

### Example 1: Production of the Secondary Recombinants with a Shorter Alien Segment

[0230] Primary recombinant lines were hybridized and backcrossed with Sears' high pairing mutant (ph/b, HP mutant). Homozygous ph1b progenies that were heterozygous for the wheat and its homoeologous alien segments were selected and crossed with the elite spring wheat cv. Galil. A population of 1240 plants of this progeny was inoculated with the leaf rust and stripe rust isolates described hereinabove. A total of 594 plants were found resistant to both isolates, 45 were found resistant to one of the isolates (28 to leaf rust and 17 to stripe rust), and the other 601 plants were susceptible to both isolates.

[0231] DNA from 100 resistant and susceptible progenies (including cv. Galil, the HP mutant, and 74 resistant and 24 susceptible secondary recombinant F₁ plants) was sequenced and analyzed as described hereinabove. A genetic map of chromosome 6B was generated based on frequency of recombination events and using the genome sequence of wild emmer wheat as reference. The GBS analyses revealed SNPs scattered along the homoeologous recombination region on chromosome 6B. In order to define more precisely the location of the alien segment in specific introgression lines, the sequences of the recombinants were re-aligned to the sequence of the bread wheat cultivar Chinese Spring (CS) (IWGSC RefSeq v1.0, wheat-urgi.versailles.inra.fr/Seq-Repository/Assemblies). Fisher Exact test was conducted to discover non-random SNPs associated with resistance. Totally, 1,362 SNPs were found, most of which were located in the range of about 0-160 Mbp (FIG. 2A). Twenty-six of these SNPs had P values of -logP>16 (FIG. 2B) and were the most likely to distinguish between the chromatin of Ae. sharonensis and cv. Galil. The recombined area was further divided into four regions, according to the frequency of recombination as reflected by the SNPs.

[0232] Seven of these SNPs, spanning the entire segment, were used to develop nine PCR probes, which distinguished between the Ae. sharonensis and wheat along this region (Table 2). The PCR probes were used to screen 520 secondary recombinants resistant to both stripe rust and leaf rust isolates.

[0233] At first, all the plants were screened with the two distal markers designated 1C and 4C (Table 2). Presence of both markers indicated lack of recombination within the alien segment, absence of one of the markers indicated recombination on either the left side (lack of marker 1C), or the right side (lack of marker 4C) of the alien segment. 38 plants deficient for one of the markers were identified, and these plants were further evaluated using the remaining five PCR markers. Based on the PCR analyses a set of 20 secondary recombinant (SR) plants was selected. These plants were re-evaluated for resistance and screened again with the PCR markers (FIG. 3). From these plants, a final set of 13 SR lines was selected based on the length of the alien fragment, the introgression pattern (FIG. 4), and phenotypic resemblance of the plants to cv. Galil. All of these lines contained a common region of 17.4 Mb that was detected between markers 2S2 and 3S1, regardless if the break point of the recombination occurred at the right or the left end. To verify this region, two additional markers, 2-3HS2 and 2-3HS3 (Table 2) were developed and used to analyze the selected recombinants as well as randomly selected susceptible lines as a negative control. Both markers were present in all of the resistant recombinants (FIG. 4) and absent in the susceptible lines. The frequency of occurrence of each marker was calculated to indicate the rate of recombination along the chromosome segment (FIG. 5). Markers 2-3HS2 and 2-3HS3 were both present in all resistant plants, 3S1 and 3S3 were each present in 16 plants, 2S2 and 3S4 were each present in 15 plants, 4C in 13 plants, 2S1 in 12 plants, and 1C was present in seven plants. In total, 2.5% (13/520) and 1.34% (7/520) of the resistant plants had a secondary recombination on the left end (indicated by lack of marker 1C) or the right end (indicated by lack of marker 4C) of the introgression segment, respectively.

[0234] The 13 selected SR lines were allowed to self-pollinate and between 20-30 F₂ offspring of each SR line were evaluated for their reaction to the leaf and stipe rust isolates. PCR analysis of the resistant F₂ plants with Ph1 specific primers revealed 12 plants that contained the Ph1 allele and one plant lacking the allele. The 12 Ph1 -poitive plants had different alien chromatin constitution: in seven plants the alien segment extended towards the short arm telomere, while in the remaining 5 plants the alien segment extended towards the long arm telomere (FIG. 4). All of these SR 6B plants were backcrossed to cv. Galil and rust resistant (R/r) progenies were selected. In this cross, the single genotype that was found homozygous for ph1b underwent another homoeologous pairing event and produced a tertiary 6B recombinant (TR) chromosome in line P-37 (FIG. 4). All of the 12 SR lines and the single TR line were further backcrossed (BC2) to cv. Galil (FIG. 1) in order to recover the cv. Galil genetic background.

### Example 2: Identifying Shorter Resistance-Conferring Segment

[0235] To further reduce the size of the alien segment, a cross between two SR BC₂ plants was performed, one with a right arm tail and one with a left arm tail (FIG. 7). The progeny of this cross was analyzed by PCR using the diagnostic primers (Table 2) and two hybrids were selected. One hybrid (R-1018) contained an alien segment that was derived from chromosome 6B in SR lines R-18 and R-10 and contained the 2-3HS2 and 2-3HS3 markers (FIG. 4). The alien segment in this line was limited by markers 2-3HS2 and 3S4, indicating even a shorter segment than in the TR line P-37 (FIG. 4). The other hybrid (R-1610) contained an alien segment that was derived from chromosome 6B in SR lines R-16 and R-10 and contained the 2-3HS2 and 2-3HS3 markers but also was limited by these markers. This hybrid possessed the shortest segment of all the introgression lines. Unexpectedly, self-pollination of the heterozygous hybrid (comprising one recombinant and one naïve chromosome) resulted in a complete heterozygous progeny.

### Example 3: Selection of Homozygous Plants

[0236] Homozygous resistant plants were selected from self-pollinated SR BC₂ progeny by their alien segment status as follows: At least 100 BC2F2 plants from each SR line were screened with the PCR markers Zyg_1_Sh_1 and Zyg_2 G_2 (Table 2). The marker Zyg_1Sh_1 (1Sh_1) detects SNP of Ae. sharonensis. This marker amplifies the same sequence as 2-3HS2 from the same middle region; however, 1Sh_1 is always used in pair with Zyg_2 G_2 (2G_2), which detects the SNP of Galil, such that in homozygous plant for Ae. sharonensis using 1Sh 1 will result in an amplified band, and using 2G_2 will not. In heterozygous plant, both primers will give a band. Self-fertile lines with cv. Galil morphology, that had the desired alien chromatin and lacked the cv. Galil PCR marker were selected. BC2F3 seeds of the selected homozygotes of each SR line were pooled and used to produce BC2F4 seeds for further experiments including resistance to stripe rust in the field.

### Example 4: Resistance Validation

[0237] Leaf Rust

[0238] Resistance of adult plants of representative SR line plants (of the SR lines presented in FIG. 4) was examined as described hereinabove. The reaction of the recombinant lines is presented in Table 4 as percentage of uredinia coverage and infection type (IT) value. The latter was converted into 1 to 9 score scale as specified in the legend of Table 4. A score of 9 was considered highly susceptible whereas scores of 1 to 7 reflected descending values of resistance. All the recombinant lines were highly resistant except line R-4 which segregated into highly resistant or susceptible individuals. Wheat cv. Galil had more than 80% coverage and was scored 9 IT value, hence considered as a susceptible genotype.

TABLE 4
Reaction of adult SR lines to inoculation with leaf rust isolate #526-24 in the greenhouse

| | | Flag leaf | | −3 leaf | | Overall |
|---|---|---|---|---|---|---|
| Line | | % coverage | IT value | % coverage | IT value | plant reaction |
| R-1-2-103 | | 7.4 | 1(3) | 26.0 | 1 | R |
| R-1-2-104 | | 3.4 | 1 | 19.1 | 1(3) | R |
| R-2 | | 25.0 | 1-3(7) | 32.2 | 1(3) | MR |
| R-3 | | 2.8 | 1 | 14.3 | 1 | R |
| R4 | R | 7.0 | 1 | 20.0 | 1 | R |
| | S | 70.0 | 9 | 80.0 | 9 | S |

| | | | | | |
|---|---|---|---|---|---|
| R-16 | 6.2 | 1 | 21.0 | 1(3) | R |
| R-7 | 10.0 | 1 | 24.5 | 1 | R |
| R-18 | 1.8 | 1 | 10.1 | 1 | R |
| R-19 | 6.7 | 1(3) | 16.9 | 1 | R |
| R-10 | 1.8 | 1 | 20.6 | 1 | R |
| R-20 | 8.2 | 1(3) | 18.9 | 1 | R |
| P-37 | 0.8 | 1 | 16.6 | 1 | R |
| Line-33 | 2.3 | 1 | 14.1 | 1 | R |
| Line-34 | 3.4 | 1 | 10.6 | 1 | R |
| Line-42 | 3.4 | 1 | 16.3 | 1 | R |
| Galil | 81.7 | 9 | 63.8 | 9(7) | S |

[0239] Table 4: Values are mean of 10 plants. IT values in brackets denote rare scores on the same leaf. IT values were converted into 1 to 9 scale as follows: IT=1 (0/0; /0;-1-/1 - -1/1-1+), IT=3 (1+/1-2/2), IT=5 (2-2+), IT=7 (2-3-/2, 3-/2,3), IT=9 (3-/3/3+). Line R-4 segregated into half R and half S plants. R-resistant; MR-moderately resistant; S-susceptible

[0240] Stripe Rust

[0241] Resistance to stripe rust was examined as described hereinabove, using strip rust isolate #5006. All the recombinant lines were also highly resistant (very resistant, VR) with 0 coverage (R-1-2-103 and R-1-2-104 gained 0-traces) (FIG. 6), except R-4 which segregated into 0 (very resistance, VR) and 50-60% coverage designated susceptible (S). The Galil variety scored 30-40% as medium susceptible (MS) to susceptible (S) and additional variety, Falchetto, which was planted in every plot, scored 60-70% (S) or 70-80% as very susceptible (VS).

### Example 5: Analysis of the Resistance-Conferring Segment

[0242] MutChromSeq is an approach for isolation of genes and DNA sequences controlling gene expression in plants with complex and polyploid genomes. It is a lossless complexity reduction based on flow sorting and DNA sequencing of mutant isolated chromosomes. Comparison of sequences from wild-type parental chromosome with chromosomes from multiple independently derived mutants identifies causative mutations in a single candidate gene or a noncoding sequence (Steuernagel B. et al. “Rapid Gene Isolation Using MutChromSeq.” Wheat Rust Diseases. Humana Press, New York, N.Y., 2017. pp. 231-243).

[0243] Dataset.

[0244] EMS mutagenesis was performed on resistant primary introgression plants (Line 42 and 34), according to Sanchez-Martin et al., 2016 (Genome Biology 17(1):221). Briefly, seeds of the resistant recombinant lines were treated with EMS (M1 population), and grown to obtain M2 generation. Screens for loss-of-resistance to leaf rust isolate #526-24 and stripe rust isolate #5006 were performed on 1,396 families and 16 susceptible mutants were identified (Table 5).

TABLE 5
Resistant lines mutated to be susceptible

| | | Submitted | |
|---|---|---|---|
| Resistant | Susceptible | to | Submitted |
| Parent | mutants | chromosome | to |
| designation | designation | sorting | Sequencing |
| Line 42 | 10.6 | + | + |
| | 17.1 | + | |
| | 20.2 | + | + |
| | 28.1 | | |
| | 57.2 | | |
| | 69.4 | | |
| | 78-9 | + | + |
| | 109.2 | + | + |
| | 125.5 | + | + |
| | 134.3 | + | + |
| Line 34 | 2.2 | + | |
| | 8.1 | | |
| | 9.1 | | |
| | 21.1 | + | + |
| | 23 | | |
| | 25.2 | | |

[0245] All of the mutants were further validated in M4 generation and crossed with the susceptible Galil and resistant plants to confirm that the mutation was in the gene candidate and the monogenic nature of the gene candidates. Nine susceptible mutants were chosen for the 6B chromosomal sorting and 7 final mutants underwent sequencing. Six mutants that provided acceptable sequence data were used for scaffold alignment (mut_10.6, mut_20.2, mut_78-9, mut_109.2, mut_125.5 and mut_134.3). One of the mutants (mut_10.6) seemed to have more heterozygosity than the rest of the mutants. Due to the strict filtering among the mapped reads and by comparing to other mutants, these heterozygous SNPs look as true ones and not a product of unspecific read alignments. Some of the candidate scaffolds were found to be heterozygous for SNP mutations in mut_10.6. This fact was taken in account when evaluating the scaffold candidates.

[0246] Methods.

[0247] Read Quality Control

[0248] Sequenced libraries QC was assessed with fastqc. All reads from wild type (wt) and mutants were of good quality, and thus no trimming was required.

[0249] Masking for Repetitive Elements

[0250] The Line 42 (wt=R) and Ae. sharonensis reference assemblies were masked for repetitive elements using RepeatMasker and the Triticeae Repeat Database as the source for repeats.

[0251] MutChromSeq on Line 42 (Wt) and Mutants

[0252] The alignment was performed according to the approach outlined by Sanchez-Martin et al. (2016, ibid). with some modifications. The initial protocol produced many unspecific alignments, likely due to the contaminations from other chromosomes, and this made the screening for SNPs difficult in many scaffolds. Particularly, mem aligner, instead of the aln aligner of the original protocol was used. In addition, the filtering of mapped reads after alignments was strict, enabling to eliminate unspecific alignments. The drawback of this approach is a lower read depth and the chance to miss some true SNPs. Later visualization of candidate scaffolds helped alleviating this issue. To identify SNPs, the results retrieved with the different aligners and strict/relaxed parameters were used, as well as visual inspection.

[0253] MutChromSeq on chr6S Fragments

[0254] The Line 42 (wt) assembly has 91,266 scaffolds and a median contig size of the genomic assembly (N50) of 12,647 and with scaffolds as small as 445 bp. In a worst-case scenario, the gene of interest could be split between two scaffolds. This would make the gene undetectable by MutChromSeq. To minimize this possibility, a “pseudo” MutChromSeq approach on the entire 6S chromosome was taken. First, the wheat recombinant chromosome 6B (r6B; wheat chromosome 6B with introgression from Ae. sharonensis chromosome 6Ss^{h}) which underwent mutagenesis was divided into fragments of 25, 50, 75, and 100 kb and MutChromSeq was performed for these fragments (4 times) as if they were assembled scaffolds. This approach produced a greater number of SNPs since the reference and the mutant origin from different genetic background. Nevertheless, detecting the mutations produced by EMS and distinguish those from the polymorphisms between different genetic backgrounds may be done by eliminating SNPs that are common to all mutants and wt, and only considering unique SNPs. This “pseudo” MutChromSeq approach also provides an extra level of validation: the candidate scaffolds from the standard MutChromSeq should map to the genomic positions retrieved by the “pseudo” MutChromSeq on the chromosome 6S^{sh} fragments.

[0255] Scaffold Visualization

[0256] Candidate scaffolds were individually visualized with the Integrative Genomics Viewer (IGV) to validate or discard putative SNPs. To have a better picture of candidates, aligned reads from the results of using different aligners and with different parameters were used in this step.

[0257] Alignment of Scaffolds to Reference

[0258] Gmap and blastn were used to assess whether a scaffold contains wheat or Ae. sharonensis DNA. Chinese Spring wheat genome reference assembly (IWGSC RefSeq v1.0) chromosome 6B, and the Ae_sharonensis_v1 chromosome 6S^{sh} assembly provided by Brande Wulff (unpublished data), were used as references. Gmap is a better aligner for this purpose since it can find full length, global alignments, while blast usually retrieves more fragmented, local alignments. As a consequence, with the parameters used (min. coverage 90% and min. identity 90%), Gmap sometimes did not produce any hit. There are two main reasons for this to happen, first, the scaffold is an artifact, and second the reference genome does not contain the sequence of the scaffold. The latter was considered to be more likely to happen for the Ae. sharonensis genome since the wheat reference is a more curated one. Thus, if gmap does not retrieve a hit, the scaffold is more likely to be from Ac. sharonensis. A good candidate scaffold should also map in or near the 33-50.4 Mb window that was highlighted using GBS markers.

[0259] Results

[0260] Since only six mutants had acceptable sequence data, and due to lack of a clear candidate while examining scaffolds harboring SNPs in 6 or 7 mutants, scaffolds with SNPs in 4 or more mutants were selected for further inspection, as long as these scaffolds mapped to Ae sharonensis chromosome 6S^{sh} and not to chromosome 6B of Chinese Spring wheat. A good candidate scaffold was also defined as having the SNPs most likely produced by EMS, that is G/C to A/T. Ideally, these SNPs should be spread within a genomic distance of no more than ˜10 kb, when considering all mutants. Finally, a candidate scaffold should map to the 33-50.4 Mb genomic window in chromosome 6B of CS.

[0261] Candidates that answered the above-described requirements are summarized in Table 6 hereinbelow. Of these candidates, scaffolds 19799 mapped around 57.5 Mbp; scaffold 00757 mapped at around 57.4 Mbp; scaffold 1934717 mapped around 57.7 Mbp, scaffold 1548600 mapped around 56.7 and scaffold 20860 mapped around 44 Mbp on Ae. sharonensis chromosome 6Ss^{h}, are of interest. These scaffolds are associated with marker 2-3HS2 and are located in the genomic region of 34-62 Mbp on the 6S^{sh} of Ae. sharonensis (minimal region that is present in all of the resistant lines as defined by PCR markers 1-9 (Table 3), shown to be linked to the rust resistance. In addition, these scaffolds contain SNPs in or close to potential resistance genes.

TABLE 6
Data of selected scaffolds

| | | | | | | | Average | |
|---|---|---|---|---|---|---|---|---|
| | | | | | | | No. of | |
| | | No. of | | | | | SNPs | |
| | | mutants | Position | Position | SNP | No. of | within | |
| Scaffold | Length | with | on CS | on AES | scattering | annotated | single | |
| Name | (bp) | SNPs | (Mbp) | (Mbp) | (kb) | ORFs | ORF | Comments |
| 101631 | 19950 | 6 | 51 | 13 | 16 | 4 | 2 | |
| 36508 | 64552 | 6 | 21 | 18 | 50 | 1 | 0 | Out of |
| | | | | | | | | window |
| 145403 | 39889 | 6 | 28 | 25 | 23 | 3 | 0 | Out of |
| | | | | | | | | window |
| 68474 | 11393 | 6 | 26 | 29 | 7 | 2 | 1 | Out of |
| | | | | | | | | window |
| 1540406 | 64196 | 5 | 31 | 32 | 13 | 1 | 0 | |
| 1900261 | 24799 | 5 | 33 | 33 | 13 | 3 | 0 | |
| 1933170 | 29906 | 5 | * | 34 | 9 | 1 | 0 | |
| 1531163 | 16584 | 5 | * | 35 | 7 | 2 | 1 | |
| 1927703 | 61472 | 6 | 34 | 35 | 30 | 1 | 2 | |
| 1895355 | 16716 | 3 | 52 | 38 | 8 | 2 | 2 | |
| 1931208 | 45874 | 6 | 35 | 38 | 27 | 2 | 2 | |
| 1935984 | 100249 | 5 | 39 | 39 | 30 | 2 | 1 | |
| 1913977 | 35574 | 5 | * | 42 | 22 | 4 | 0 | |
| 1916860 | 13004 | 5 | * | 43 | 7 | 1 | 1 | |
| 20860 | 19882 | 5 | 41 | 44 | 13 | 3 | 2 | Preferred |
| | | | | | | | | candidate |
| 1891763 | 32429 | 6 | 44 | 44 | 28 | 4 | 0 | |
| 1937448 | 32664 | 5 | 41 | 44 | 23 | 2 | 1 | |
| 1896571 | 26451 | 4 | * | 46 | 20 | 1 | 1 | |
| 1528020 | 22991 | 5 | 42 | 47 | 15 | 1 | 0 | |
| 1935712 | 23698 | 4 | 45 | 47 | 7 | 1 | 2 | |
| 1893110 | 27610 | 4 | 48.5 | 48 | 23 | 1 | 0 | |
| 143060 | 19845 | 4 | 41.8 | * | 9 | 0 | 0 | |
| 1898148 | 53213 | 5 | 52 | 51 | 20 | 1 | 1 | |
| 1934541 | 75783 | 6 | 51 | 51 | 60 | 1 | 1 | |
| 1538547 | 15026 | 6 | 56 | 56 | 6 | 1 | 1 | |
| 1549600 | 4667 | 4 | * | 56 | 2 | 1 | 3 | Preferred |
| | | | | | | | | candidate |
| 1872406 | 28545 | 5 | * | 56 | 7 | 2 | 1 | |
| 1893110 | 27610 | 4 | 48 | 57 | 5 | 2 | 0 | |
| 00757 | 26399 | 4 | 47 | 57.5 | 4 | 1 | 3 | Preferred |
| | | | | | | | | candidate |
| 75951 | 17615 | 5 | 48.4 | 58 | 8.5 | 2 | 1 | |
| 19799 | 28828 | 4 | 46.9 | 58 | 11 | 2 | 2 | Most |
| | | | | | | | | preferred |
| | | | | | | | | candidate |
| 1889560 | 34686 | 5 | 46 | 58 | 25 | 2 | 1 | |
| 1893791 | 29225 | 5 | 49 | 59 | 13 | 2 | 0 | |
| 1892710 | 15139 | 3 | 99 | 61 | 7 | 1 | 1 | |
| 26517 | 26612 | 6 | 52 | 65 | 15 | 1 | 1 | Out of |
| | | | | | | | | window |
| 65510 | 26651 | 5 | 346.2 | 96 | 10 | 0 | 0 | Out of |
| | | | | | | | | window |
| 9306 | 18685 | 4 | 200 | 150 | 14 | 0 | 0 | Out of |
| | | | | | | | | window |
| 24498 | 32275 | 6 | 493 | 409 | 3 | 0 | 0 | Out of |
| | | | | | | | | window |
| 88018 | 23923 | 5 | 44.8 | * | 12 | 2 | 1 | |
| 1926247 | 22585 | 2 | 47.3 | 57.5 | 10 | 1 | 1 | |
| 1929618 | 20160 | 3 | 46.9 | 57.4 | 2 | 1 | 2 | |
| 1934717 | 65001 | 6 | 47.3 | 57.8 | 50 | 2 | 2 | Preferred |
| | | | | | | | | candidate |

* Maps to different places on the chromosome

### Example 6: Rust Resistance Resistant Genes)

[0262] Rust Resistance Gene(s) are Identified as Follows:

[0263] 1. Sanger sequencing all of the available susceptible mutants, the resistant parental lines (42 and 34), Ae. sharonensis and Galil plants in the region of SNPs in the following scaffolds: scaffold 19799; scaffold 00757; scaffold 1934717; scaffold 1549600; scaffold 20860. The Sanger sequencing is performed in order to compare the resistant and the susceptible lines and to validate the presence of SNPs. 2. Identifying coding sequence of potential resistance genes and validating the presence of the SNPs within or near coding sequence.

[0264] 3. Cloning the potential gene.

[0265] 4. Introducing the sequence of the potential resistance gene(s) by transformation into susceptible wheat cultivar and examining the transformed plant resistance to rust diseases, validating the gene(s) function. Transformation is performed according to the method described in Ishida et al. (2015, ibid). Susceptibility and resistance of the transformed plant is examined as described in the Materials and Methods” section and in Example 4 hereinabove.

[0266] The foregoing description of the specific embodiments will so fully reveal the general nature of the invention that others can, by applying current knowledge, readily modify and/or adapt for various applications such specific embodiments without undue experimentation and without departing from the generic concept, and, therefore, such adaptations and modifications should and are intended to be comprehended within the meaning and range of equivalents of the disclosed embodiments. It is to be understood that the phraseology or terminology employed herein is for the purpose of description and not of limitation. The means, materials, and steps for carrying out various disclosed functions may take a variety of alternative forms without departing from the invention.

The application's sequence listing, which the Patent Office published only in electronic form, follows.

SEQUENCE LISTING (62 sequences)

SEQ ID NO: 1 - DNA, 28828 bp, Artificial Sequence
  Scaffold 19799
  misc_feature (211)..(290): n is a, c, g, or t
  misc_feature (331)..(477): n is a, c, g, or t
  misc_feature (858)..(958): n is a, c, g, or t
  misc_feature (1449)..(1627): n is a, c, g, or t
  misc_feature (1733)..(1840): n is a, c, g, or t
  misc_feature (6254)..(6465): n is a, c, g, or t
  misc_feature (13114)..(13148): n is a, c, g, or t
  misc_feature (14039)..(14084): n is a, c, g, or t
  misc_feature (14951)..(15037): n is a, c, g, or t
  misc_feature (15574)..(15633): n is a, c, g, or t
  misc_feature (16458)..(16551): n is a, c, g, or t
  misc_feature (16596)..(16642): n is a, c, g, or t
  misc_feature (16660)..(16834): n is a, c, g, or t
  misc_feature (16956)..(17007): n is a, c, g, or t
  misc_feature (17148)..(17179): n is a, c, g, or t
  misc_feature (19855)..(19944): n is a, c, g, or t
  misc_feature (20515)..(20566): n is a, c, g, or t
  misc_feature (22597)..(22632): n is a, c, g, or t
  misc_feature (27261)..(28826): n is a, c, g, or t
gtagctggtcaagcagttttccacatagtccacaaatttgggatttttctgagtgacaacatatatccccactaccttatggaacccaagtaatgctgaattgcctgctgactacggtgattatcaattatgaaaattgaatcacaatctgaagagtcagtcaggtgtatgtatcgaaggagtgagctaggacagttttaaaccttagtannnnnnnnnnnnnnnnnnnnnnnnnnnnnnnnnnnnnnnnnnnnnnnnnnnnnnnnnnnnnnnnnnnnnnnnnnnnnnnntactaaatttcattgtgttctaaagctaaagatgcttatannnnnnnnnnnnnnnnnnnnnnnnnnnnnnnnnnnnnnnnnnnnnnnnnnnnnnnnnnnnnnnnnnnnnnnnnnnnnnnnnnnnnnnnnnnnnnnnnnnnnnnnnnnnnnnnnnnnnnnnnnnnnnnnnnnnnnnnnnnnnnnnnnncagttttaaacttttttttctctaaagctaaagatgattatagtttacagcacaagatatcacaagcaagcacagggtggataaaacatcaccgaaatccagatgaatataaaaatgtaaattcagttaaagataagatatacagcccgatcttccacccattactttataaaataaagtatgctggcagtgataattcagttaaatatctaaactaatctgtttctcctgcaaagtatggtggcagccatagctcagttgaacatggaaccgtttgacactctctccttggattaacctaactaaactaatccttttctcctgccaaggaagtggcctgttttccggactgtcaaaaaccgtatttcaaaagccatatcnnnnnnnnnnnnnnnnnnnnnnnnnnnnnnnnnnnnnnnnnnnnnnnnnnnnnnnnnnnnnnnnnnnnnnnnnnnnnnnnnnnnnnnnnnnnnnnnnnnnnagtagtgctggtggtatacttctgcccaatgctagagcagatcttcccagttaagatcctaattacatttctaagtacctacagagagttcgccatggagaaaagcagctagctcttacacatgcatgtatagatcaaccagttcagttctagtgttgttggacttttggatcaacacaaaaatgtactagtagtaaaatcttcaccagagagagcttcattagcagaaggttccagagagcaagccaatagcagtaccagctcctagtaaacagcagggtatctgattagtaacataattaattaatcatggcctgaaaggtagagcaagtctgtctgcagtctgcacaggtaaggaatgtaagatgaaacatgtatttcaccaactaatctaatgggctggcataaagtaaacactaataattaattaagcattaatttgttacacagctgttagaagcgttggcgctctaattacgattcagagatannnnnnnnnnnnnnnnnnnnnnnnnnnnnnnnnnnnnnnnnnnnnnnnnnnnnnnnnnnnnnnnnnnnnnnnnnnnnnnnnnnnnnnnnnnnnnnnnnnnnnnnnnnnnnnnnnnnnnnnnnnnnnnnnnnnnnnnnnnnnnnnnnnnnnnnnnnnnnnnnnnnnnnnnnnnnnnnnnnatatcactacaacacgatcgctaattgaaggcgctttggtaagggcattttctctaaatgtttaaggaggcattttgaagagtttgccttaaattcatctctaacnnnnnnnnnnnnnnnnnnnnnnnnnnnnnnnnnnnnnnnnnnnnnnnnnnnnnnnnnnnnnnnnnnnnnnnnnnnnnnnnnnnnnnnnnnnnnnnnnnnnnnnnnnnnttgatagagattttgaggctattttcgaaagcgcctcctaattgattgatgtctttctcaaaattgagctacaactctgccttgaaggcctatcggagatgagctacgtaatgatttttgatcgggggacatgctagtctgcagattctttggaatttggttcggaacgatctagctaactactccaaggctccagggaattgaagaatcgttcacttgtctaaggtggcgtgaaagttcctggtggggactggggacatttgcgacagcagcggctggaggttgacgactacgaaatcatcagtatttatgacattttttttgcgggggcagtatttatgacattgattccgtagtaaatcacaactctggactagttctactagtcgtgaatgcgaggctagcacttatcggtcctggttcgaatcctgttatcgccattttcccgggtgagctttccacataaccgatcaatttagtcccatactgttttcaactcatccagaggcatttttataatgcctcgtaacctcatcagatggcagagaattccaagtgcatgagcccagctgtaggatcatagacaacagctaaagatgattagagcacaagaagtcacaagcaaagcacataaaacatctaaattcagattgaacaaacatgtaaattcaattaaatatgtataaattcagttaaagttttttaacctggttcattttttgtggccattgccgcattatggaaaaaggaagtgtctctatccccatgtattagccaatttgcctttcctctttgacctaataatctagggagctaccctgcaaaaaaaaaaaatgaataatctagggagcttagtaattgcaaggatgaatatttaccttctttttcacaaagatgaattttattaactataaatgaaacacaaggggatacaaacacagtgagcgtacactcgacatctacataattaaaatgcgcacaaccaacatcaacgcacgcacacaataaattataccgacaaatagcaaagtcatacaaggctggaattatgcaacaaaaaagaaagagaaaaagaagaagaacgatggtctatgcgtgagcaaatgtttaatctccacgtttgctctcttccaggcgccgacacccggacgcagttttttacgttcacgttccatatgcagcgcgaatccgagccggtcatcatgcatgatgtccaatcagttaggcccactgttttgtcagccatgcaccagccagaggctagtagattcgtttctctagctaggtcatgtgcatgctctgtgcacttttcctgtttagtggcaggccagcctcataatttatatctggcgtggataattaacatggctagttactctttttttgcgggtgaagtcgctggttactttttttgcaggataacgtcactagttactgtgggattattacatgttaacctacagcctcattaaaaaatcacgcacatgcaatttttagactttatgaaggatgtacctgaactttgccatgaaaatcaggaggacttttgaaaaaaccattgaaaattgaaaagttctttgagttttggcaacaaatttccaaaaatatgattaaaaagttctctacctatttttcaaaaattgcgagctatgccagagttttccaaaagttcttctatttgtcatggcaaagttcacataccagtgtaacaaagtttggttctatttaaaactatttaaataacattctttgagaacaatttcaataacatgatattttaattttgtgatgtttaaattactttcaacatcataggctagagaggtaatcatatgaattaattccataaccggaggggtaaagcgaatcttgctactactaaacaagactagccaacagcgtcacctactactgggcaagactagcctgtgtcctagcggggcccttctcagctttctcacatgcatcatgggtagatttggatgattgagatacgcgctgtgaaggggaacgcgaaagtaaatgccttttccgccggcaacccctccaccaccaacgccaagctccttcgcccggaggctgctagatgtgtgcggtggtggggtgtgcagtccacggaggcggcgagctgggtcctgcgaactgcacacgatggcgatctgggcggccgccaccaccatctcaccatcgccgctgccgcgaaatcccacgctacattgctcaagtccggtgtcacctcccccacgccctggaaccagctcctcaccgcctactccctctccccgctcggcctcgtcgccgcgtgctgcatgttcgaccagatcccccgccaggacgccgcctcctcaccgctcacgtctccgccggcgcgcatcccgccgcgtgccgccttctgcgggcgatgcacgagcgggggctcgccgccagcaccttcgccattggctccgctctccgctccattgctgcggtgagctgccctgctcccgcgcccatctgcactcgctcgtcatcaaggccggcctggcctggccgataatgtcttccctgcgaccgcattgctccatatgtaccctaaatgtggccgcacagtgacgctcatcgggtgttcgatggaatgccggagcggaacactgtttcttggaatgacgttcatcgggaagtcaatgcatactcatcagcactggacataatcgatggaatgccttgagattcttcagatgtatccagttagaaaatattagaactgatgagtgtgcattctctgctgccttgcgttcatgctcagaccttgctttacttcggataggtagacaaatacacggtttattcatccattctggttttgcttcccacaattttgtctccagctcgctgatcttcatgtattttaagagtggcattcttgatgatgcaatcaagtctttaatttgaggaggcagatacgagtagctctgtgccctggaactctatgatgtttggttatgcgcagcatggacaggcgcaaggccgcaagccgtgtgcagcctcttcaatgagatgctggagcttaaggttcctttggatcatattacatttgttggcctcattactgcctgcagtcatgctggtcttttacacgaaggttcagaaatcctcgatgcgatggaaattaggtatggaattcctcttcggatcgagcattatgcatgtggcattgatctgtatgggagggctgagcagattgacaaagcaaaagagcttattgaccttacgccatttgaacaagacgccatggtgtggatgaccctgttaggtgcttgcagaatccatggtaatattggaggcagaacctagatagcattccacatatgttctcctctccagcatgtattctggtgttgggatgtggagtgatagagcaatggtgcagtggggaatgaagaataaaggattaagcaaagtccctggttggagctcgatcgaggtgaagaatgaggtgcaccctttcaatccagaggatgggtcatacccaatgatggatgatatatatgagatgttgagtttggtacttcacaattttcccatgcagctggtgcatcaagaagcaactggagccatcaacggctgtgagcaactcgcctcttaatatttttattatccttttacatttatgtgcatcaattctgtcttcgagtttacaaccactgtctgtttattcacacagtatattttggttggtcgcagaactatcagattatgggcattaaccagctagcccctgttggagatggttgggcacacttctctcttatattatttggatgcacattcttctggcctgattgctagtggcagtgaagaccgctctgtcaatacatggaaaggtgatctgttttgtatgctttggaaaattcatgttaaaatgcagttatactattttattggataggatttgtttatacttatatcttctctattgaacaactcttgaaaccctgacctttccactgtgggcactatccattctacaaatggatttgtctaaataaatgtcaaattttagtaaagtcaatgtctccttgtctatgctccggtctattccaaacaaaaaaatggttctagtccacttcccttaagcagggacctgcatcataagcaaatgatcctacagatctttgatcttaaacatataagtagttgcaaactgaaaagtcactatgatacaaaccatgacaagaagttagagtgatctgctagttgtttttcagcatttggattcctgcttcttcctttgactagtccatgaccatgagcagcttcattggcctttcttgggaattaggatacagtcgatgttccagtttatttgttatgtcaaagtttgagctacaattggcctaatgcttcattgtaactgcttggagagaagatattnnnnnnnnnnnnnnnnnnnnnnnnnnnnnnnnnnnnnnnnnnnnnnnnnnnnnnnnnnnnnnnnnnnnnnnnnnnnnnnnnnnnnnnnnnnnnnnnnnnnnnnnnnnnnnnnnnnnnnnnnnnnnnnnnnnnnnnnnnnnnnnnnnnnnnnnnnnnnnnnnnnnnnnnnnnnnnnnnnnnnnnnnnnnnnnnnnnnnnnnnnnnnnnnnnnnagggtgcaatcaatgctttcctgcaaaaataaaacttgccaacatagaagccagtgcctcgacttggagtgaggatgccactttcgcagacacggcactgatagccatcttgattgaacacgggaattctcaaacccacactgtcgtcttctttccaatcggcatcaataaaacacacctgtatttatgatggaaatatgtcttgttccagggatggtgatttgagttgtgagtatcaagggtgcagttagatcaccattcctttgtcatgtttttgacgatagtagttgcttggattcatgtcatgtgctactgtagaaaaggaatttatattttatactggcagttataaacagtgatcttatttggttatgtagccgaatgcagattaagtgctgtatgtacttggttatataatgcagaggggatctgtgttcgaagtattgaacacccaggttgcatatgtgatgctaaattcttggaaaatggagatgttataagtgcatattctgatggaatcgtgaggatacggacaaccagccataatagggttctgcagtaatgaggaacgtgcagcttatacacagatcttatttctctgtacacacttagcaggttggtttctgttgcttacaacatgtatgagtagaaaagcatatttacacccatttgagaataaatatgtaaatctcacaaagttgttgatgaacacattttggccctagttcttattctaaataacagttctgattcttcatgggttattttttatgcatcacaaaatcctatataatatttctaactcttcacgggttattttttactgcaatcgtacagctgactttggtcctagtttcctttttattgctttgggcatggagccgcataatacatgtttttctctgtgtagactttgtttctcgttgcattatcattgtttggttcatggatctttttgtgtgatacagtcattcacaagcaaactaaattgcttccaaaggtgcattgtgaactatggtgttttactacagtattgctattgcagctactaaatttatgaaatgcttgccacttagttctttccgcatatcttgtggtactctcagtatcctttctttcagacttactgttttagcatctctattaggtgcttggtatccaggtttaaacttttggttgtaattttacttcgcaaattggctgcaatgagatccaaatatagacatggtcatactgtctgtggtttgtcttcgttccaacctataggtccatccaatacttggtcatgcattaggtgttgcctccattgctatattatattgtttgaaatgaagtagtcttgggtgttaaaatatttggtctcagcatcaggcttgcattattggtcatgtggaaatgaaggagttggtctcgaggtgtgccatcaacctgaatcacaaaaaattatgtggttatggtatttcaaatagtttgaaaagttcactaaatagtttggccatcttccaaatgaacagacgatttcaacgttaagtataccacttgctcccctcattattggtctctatgattaaattagattttctgtgctattgctacgaatcttcctggtctgcatttgaacaagctctttcttttaagcggaacaaggctctactcacattttcgtgcaggttcgtactttcagaaggaaagcaaagaaaaatacaacacctatggatagaatagcatatttacagccatttgagaataaatatgtaaatctcataaatttgttgatgaagcacattttggatttgtgtttatttcacagatatatgtattttaattgaaatagtagctgtcaacaactctcatatttcaagcctgaaaaaaaggaaattcaagaagactttagaaggcacataagtctagacttgtctcgagtgagtcctaaagaatatatctaggtacatctaagggtatatagtagtaaacaacacttcaccagtttcctagtgcagacttaactaaggcaatatgcctctgtcatgcaatataccaattggctggtgaatggtgactgctggcttcttgatactattagattagaggtggcgtcagttgcattgtaccattgaccagctaattagctgcctgcacatatatcaatctgatgattgattaaagctggtgtagctcatctttcattgtcatggtgagctgtcgatcatgtcagatgaacaagacaatttagcgtcgtttgcgtgcacgcatcctggacacatctaactttctgattgatctggcaccactaattaatcagttaatattacatgcagcgtcatttgtggccagctaatataattatataattagaggctaagcaagactatccaacatatagccagctaatataattacagagatgctcatacaagttgcattaatgtagtaacagggtagcgtcagagggctaatttccctttggctttataaacatagaggtccgtcctttctagctagccctttaccagcacgagcagcaggagcaacatccagtccatcttgaaggtaatatcgggtttccctttctgttgcttggctggcttttgattgcatctgtcgatctaggtgccttaagtttgcctatttctattattgctcatggttataaattgttcatcatgtactcgtgttagcattctagtacggctattccctttctttttgccggtaatattagctacaacgagtgctggagatgatatgttggttcatctttgttacagcaaaaagcagcgaacatggcgatggtcctggatgcttttgcatcctacatgcaaaacatgctcacggagatggtgaaggaagaggtgtacatgctgcttggagtcggagatgagattgagaggatggatgtcaagctaaggacttccttgcagacgctgacaggagaaacatcaccgacaagagcgtgcaagagtgggtggcccagctcaagcgtgccatgtatgaagctgccgacatcctcgacctctgccagctcaaggccatggagcgcggtctgtccactaaagatgtggggtgcttcaaccccttgctcttttgcatgcggaatccctcccatgcccacgacatcggcacccgcatcaaggtgctcaacaagaggctcgccgtcatcaaggagcgaagcgctgcttttagcttcatccctcttggttcctatgaggatcgtagcagcaaggtgcaagcctctcattctggaaataagagacgtgagacatcaggggtgtttgaccggtcaggtgtagttggagagaagatcaaacaagacacaagaaagctggttgagatcatgctgagtgaaaaggagggcaacaccaacatcatggtggtcgccgttgttggtgtcggtggaatcggcaagaccactcttgcccagaaggtcttcaatgatgaagccttgaacaacgagtttgagaagacgatatggttgagcatcaacaaggacttcaacgaggtggaattgctcaggactataatcacgcaagtggggggagtacatggtgatgaaaaggcgttggctgtgcttgagccaatccttgccactaccttgaaagggaagaagctattcgtggtgctagatgatgtttggaaccatgaagcatgggatgatgtgcttaaaacacaattgactaatgtcgtggctcgaggtagccgagtcctcgtcactactagagatcaaacagtagctcgaaggatgaaagctgtgcttccttaccaccatgtggacaaattagaggagaaggatgcctggtcattgctcaagaagcaggtgcgtaactgaattccatgcatcattaatattactagctccatgcttttttggggtagagatataataattggtcacactaaactttgagattacaatgacatggactcatacaacatggatgctacatatacatgccacacaacatgcacctgccgcatgctaacgtgcttccaaaagttgtataggtggaactctagcgagtagtcggttttgagttataatccgagcctttgtgctcggcttgtaacaacggtggacgggtatcttaccctcttctctcaatataagatacgcatacttatgcgtattctagaaaaaaaaagttagactacaatagcactagaccccacgtatcattttcagattatagttgtacctgggagtaattaattcaatttttttttctagtctctatcttttttttcttcatattttggcgccggtttcccattttagaaagctaaaattttgaaataaacgtagtcgccacctaaaatgcaaatccaaacaaaatcattaattaggaccatgtaaatgttcttcaatttataaaaggtgaaaacaagtggtattattcttccatttccatcatgtttacaaatacacagtcaactcttgggctaaaacttagtcgtgtttggcataagtggtatagtactataccacagtatgaaaaagctgtaactgatactaaagtgtgcccaggcccaccaataggttctagccaacctgtcccatgatcaaacaacatgaatgaaaataaaagcgtgtacttcaaattcttctacttatcggatgtccagattataaaagtgcatacgtgcaattatacataatttaaacatgtaagaagtctcctcccttttgtagtcgtagatcaaatatgactctatttttcggagaatggatttatgtattgtagtatctatccgcataattttacacataatttctatagattctgagatgatagattgaactaagcatattgtggctaaaagagtgagaaacttaacatcttatctgagtgagcatgttatgattatagtaactcacattctaggcatcccagttgacagcaacatccctgcttagcagttcattcacttcatagttcaatcatgtagtacattaaccgttctttctccactagcctattattgactaatattaagttgacactagcagttaataaactattattttttctctcaaggaaaaccactccttattgaccgataatttaggtagttaattgcttgcagataatatcaaatgagattgatgaccatgacatggatatgctcaaggatattggactacaaattgtagcaagatgtgatggtttgcctcttgctgtcaaagtaatgggaggactcttgtgtcagagggacagaaaacaccgtgagtgggagatggttttgaatgattctatatggtcgatatctggaatgcccgaagggctaaacaatgcagtatatttaagttatgaagacttatcttcttctgccaaacaatgctttctacactactcccttctccctaaaactacagtgttttatagcgatgaaatcattggcatgtggattagtgaaggatttcttcacgggacctcggatgacttagaagaactaggaagcaagcactataaagagctgatactgaggaatcttatagagccagatacaaagtacgttgatcaaaatgtttgctacatgcatgatgttgtacgctcatttgctcaatttgtggctagagatgaggcacttgcagctcacagtggagaaactaatattgttaataaacttactacacatgggtttcttcggttatctctagaaagcaaagcatcagaatcagatgggttagactggagttctttgcaagcacaaaagacattaagggcactaatatcagttggccgtataaatatcaagcctggtgattcgttggttcatttcccatgcctacgaactttacatatagattctgaagatgttgtagcattgcttcaatctttgcagaagctcaagcacttgaggtacttgtccctcacaaacaatgatatatctagtctgccagatagcattggaaagatgaaattgttgaagtacattagccttagaggatgcaaacaatttgtggaacttcctcgtagcattttaaagttaggggagctaaggtattttaacttcagtggaaccagtataagtggcatacctagggggttctgtgctctaacaaacttgaggttagtatatgggtttccagtttcggtggatggtgattggtgcagtttggaagagttgggccctctttgtcggctcaggcgtcttggaatacatgggttggaggatgtaactgtttcctcatccgcaacaaaggcaaagcttggtgagaaggtgcatcttaccagactgtccttagattgtggtagaagattgggagatgatgggctgattaaagaggaagatagtgtctctgtggaagagcaacaacgaattgagacggtgtgtgatgagctccgtcctccacccagcttagataatcttgaaatcaacggatattttggccgacggctaccaaggtggatgatgtcatcattagttgtgccccacaacagcttgaggattttgttcattaacgacctggtttgctgcacacagcttcccgatggcttgtgtcagctaccctatttagagttctttcagatcaagcatgctccagccatcaagcgtgttggacatgaattcatgcagtcctacgatcaccatagtcctagttcttcccaggtgttggctgcattcccgagactgcatgagatgaatttgnnnnnnnnnnnnnnnnnnnnnnnnnnnnnnnnnnnggagcaagtgcaagcctttcctgccttgcagaaacttttgctaaggcaatgcaaattgaggcatcttcctcctggccttgcctcccaggcaagggctttgaataaattgtccatacaatctgtccagggtgtcgtctctctagagaactttccatctctggtcgagctgttcctggatgacaaccttgacctggagaggatcactaatcttcccacactgcagaagcttaccatccaagactgcccaaagctgaaggtgttggagggtatttctgcacttcataggctagtgctcagtgatgtaaacatggtgacactcccaaaatacatgggaggtataaacccaaattatttggagctatactgtagcttaccgctgctctcttccatagcagcgggtcaatctagccccgagtggaacaagtttggccacgttgagcatatcaaggcttatgcacgtgaaggagataatgcaaggaaatggtacatcttgtacacagctaacccctacaagctggagacaaatgtcagccactctttcatgtccagaggtaatttagcattggttgttcatcttaatttgtatattcattcaggttatttgaactattctctttgtttttttacattccattggtatgttggagttcgaatatattccctgcattatgattccttttgaacacccttctagagtaggacaacaaaagtatggttgtaaggtcgacatagtatcatttatgttgttctcacttgttcgagcagctgcatcaggctcaggggaggaaaacaagaaacaagcagagcagacaagaacagcagatgaagggatcatctgttgccccatcggacttcgtgctttttctttgggccttgtacttgtgactgcannnnnnnnnnnnnnnnnnnnnnnnnnnnnnnnnnnnnnnnnnnnnnctgagagatgaagagatcattattaagtaaaaaggacttctttctgccgcatcttccagtttcattctaggtactactgcacactgtgcttcaagccttgttctctttcttggtttgttcttttggtatggcactaattcagtgagaacctttaactgaataactccgaaagaaaggaactaatacaacacattacctgctagctgagattcttatgtttttccctctctgtgttggcaattactttaattaatcgttcattcgttcagtagcatgggtgatttggacattaaagttagcagctgaactctgcattgaacgaaattcttgatatgttaaaccatggcacgtgtttgtttatctgattctgattgaactaaagctttggtttgattaggtagaagggaagccgttcatcctgcaggcagctggagccttttaaatgcatggattcagagcagccatggcaatggagctttatattgatgctgtgacatgaattgaagttcaacattttattaagtttggtcgtctatgtattggacaaagtcaagtacgtattatgtagtccatactttatttatgggcattaaataagcttttaggcgtcagaaaaacaacaacagtgtagcgcacattcatgcatgtggactctcagctggtgcagagtgcaaactgaagaatggtcagacatataatgtaatttgcagcccaacctaaacctttgatagggttggcacatcacgtccttcagagcgatgatttataatgcgacttcagctaacgtggaatttcatcaccatattatgtcgtcaatgaacagattctgcacaccgggttcatttggtcagtcctctgtagactgannnnnnnnnnnnnnnnnnnnnnnnnnnnnnnnnnnnnnnnnnnnnnnnnnnnnnnnnnnnnnnnnnnnnnnnnnnnnnnnnnnnnnnggacatccatcagacaagaattattctttgctaaaaacaggcaagaattcttctaattaggccatgtactggaagaatgtcatcaccagctcagctcatacaaccgaacactatgtagccttgattgtatagtatggtttgtttctcttcccaccaaaagaaactgtttgtttcacattttcatcgtctgaaaccatttgaatggacactcatttcggtatcaggacgtgaataaatttagttagagtttgatgtcacctagctagaagcacctggaatttagcttgctctcgaatgatcaattttttcgtcgacgttgagtgtttcagcaccatgtcaggtgaagcttgggaacgagggccttaatcttgaagactagcgtgagatctaaaatggaaacaatcaccaacttcttaaattttccatgtcaaaaggagatatgtcaaacaccaactcctgtttcaaaaataacatatctatttctgtgtatatgtgtcaaaccatacatggctacatggtaagttctttttttaagannnnnnnnnnnnnnnnnnnnnnnnnnnnnnnnnnnnnnnnnnnnnnnnnnnnnnnnnnnnttgtccaaaatagatccccactatattaaagatgctaagtgatacaaaggaccccagcagtagccagttcagaaccgcgcaacttcgaatcagattgtttccgatctgaagttttcctccaccccaaagacgatctccagatcgattgtccgagggggtgcacctgctcgcctggtatgaaaccgtggaagccggtcgatgaggggtgtagatgagcccgggagatccccatcttggtgagagtgtcggggaagttgatgtttacgccgcttacgtgctcatagatgtactccatgtctgaatccattgcttcgtatagaaggaaggaaaagtttcaaaattttagcacggacatttcaacgaacacttgccggagtggtaacacccacggacggcatccgcagaggtgatggtaccttctggtggatagtcgagaagtgtggaatgacggcgtaggcaaagcgcgtggcgatcggttggaatggtgtaggcccgacaagggtttggcggtcggctgggtgctacaacgatggcgtcgatgaggaaggaagcagatacagagcaaggggaaagggatggccacgcggggtccgagtgtggttttggttgggacaaggccgttgaaatactacgtggtgaaggtgtgaaaccccgtaaagctcccctagtttgctttccgtttgcagtaaaacagccaaccaaactggcacacgaacagatgcgaaacaatgttggatggcaaagtgcgtccggaaggttgcggacaatttgttggtttgctttagagatgccctgattcaatcggttctatagtgaaagttgagnnnnnnnnnnnnnnnnnnnnnnnnnnnnnnnnnnnnnnnnnnnnnnnnnnnnnnnnnnnnnnnnnnnnnnnnnnnnnnnnnnnnnnnnnnnnnntatgccatttgtctcgtattagttgtggctccaacagatatatcnnnnnnnnnnnnnnnnnnnnnnnnnnnnnnnnnnnnnnnnnnnnnnncaaagggagtactatttnnnnnnnnnnnnnnnnnnnnnnnnnnnnnnnnnnnnnnnnnnnnnnnnnnnnnnnnnnnnnnnnnnnnnnnnnnnnnnnnnnnnnnnnnnnnnnnnnnnnnnnnnnnnnnnnnnnnnnnnnnnnnnnnnnnnnnnnnnnnnnnnnnnnnnnnnnnnnnnnnnnnnnnnnnnnnnntcttcttcccttttcgactgcattcgccgtcgcggacccatttgctatgccgtcgccggcaccggcgcactcctcctccgatggcttctacccaccgaccacttcctctctcacagcccaannnnnnnnnnnnnnnnnnnnnnnnnnnnnnnnnnnnnnnnnnnnnnnnnnnnccggacggccgaccggtccctgggggcggatctcacgcgcagcagaaggaggatgcagccgccgccgggagaagcaacgggctgcctcgacggcggcaaggtgagctggtgagcactgacccgcattttccgctccgtcgnnnnnnnnnnnnnnnnnnnnnnnnnnnnnnnngttggattgcatcgaccgacagctccgacgtatgtgaaatcgattctaatacagctccatgtcccctacctactccattaatcttgcattgcacgcatgggccgagcaaggattccaggttgctgcaggcgtgggtcttgatgatttactttaaagttcattagcaaaaagaacaaccaccacatgcacaaagtctaaagttaatcaactatccaagcatgttcaatatcaaattatgacctgttgttgtcggctttagcgcgaatctagatgatgatgcacccaactgatcttaaacaaaggtaaagttgtaaagccatcttctctcagtgaactctctgcatactacccaccccctcctaatactaatacaggtccatctcttcttatgaagggaacacaggcccagctctactaacaagccatattctgcatcatctggtgggaaattgtccattgatatttttctgcccatcgttctggtctagggtgcgagagggacgcgtttgctcaagcggactatcacgaggagcagccattgcgccatggtcacatgctgtgtgcggcgagtggtgcgcttttttctagagcaatcaccgcaagcaagggcttctcaatctactctgagctcatgctcccagatccaggtaaatctcctatcaggctctggattatctgcctacatttttgcctttggagagctgatttacctttcgtttgtatacacacagtgctctgtacgttttagacctttacttgtcctggtacgagcagcaggacccaacatccatcaatcttgaaggtaatatcatatttcctctatttagctacctttgcttgcatctatcaaatctaggtgccttaagtttgcctatttctgttgtttctcatgcttataactcgttcatcatgtactcatgttagcattctggtacgccccttccctttcctttttgctgataatcttaattagctacaacgagtaatggagatgatgtgttggttcatctttgttacagcaaaaggaagtgaaaatgacaatggtcctggatacctttgcatcctacgtgcaaaatatgctcaccgagatggtgagcgaagaggtgcacatgctgctaggagtcacagacgagatcgagaagatggacgttaagcttaaggatctcaagaacttccttgccgacgctgataggagaaatatcactgacaacagcgtgcaagagtgggtggcccagctcaagcgtgccatgtatgaagctgccgacatcctcgacctctgccagctcaaggccatggatcaggctccgtccactaaagatgtggggtgcttcaaccccttgctcttctgcatgcggaatccctcccatgcccacaacatcggcacccgcatcaaggcgctcaacaagaggctcagcgtcatcaaggagctggttgagatcatgctgagtgaaaaggagggcaaccccagcatcatggtgttcgccattgttggtgtcggtggaatcggcaagaccactcttgcccagaaggtcttcaatgacgaagccttgaacaacgagtttgagaagacgatatggttgagcatcaacaaggacttcgacgagattgagttgctcaggacaatcatcacgcaagccgggggagtacatggtggtgaaaagacgttggctctgcttcagccaatccttgctactaccttgaaagggaagaagctattcctggtgctagatgatgtttggaaccatgaagcatgggatgatgtgctcaaaacaccattggctaacgttgtggctcgaggtagccgagtcatcgtcactactagagatgaaacagtagctcgaaggatgaaagctgtgcttccctaccaccacgtggacaaattagaggaggaggatggctggttattgctcaagaaacaggtgtgtaactaaactccatgtatctttagtattactagctccatattcttaatttggggtagagatctaataattgggcacactcttttatgtagtattgttttttgagattaaaacatggactcatataacacggacactacatatacttatgccacagcacatgcacctgccgcatgtgtactgtgtgtacagaaggcacaatattttgaccctgtatcaaatttagattgatgagagttggacaaccatgctcccacaacaacactagacctcatgtatcgttttctgattatagttgtacttaggagtaattaattcatttttttgcaactgtgactcaaagaacttgttgctatgttgccactgttttcccccttagaaagctaaaattttggaatataggtaatcgccacctaaagtgtaaggccaaacataatcaataattaggatcgtatgaatgttctttgatttataaacggtgaaaaactgtggtattattcttccatttccattgtattcacaaatacacagtcaatccttgggttaaaactcagccgtgtttggcatacgtggtacagtactataccacaatatgaaaaggttgtatttggtagaatgacactaaagcatgcccaggcccatgaataggtttagccaacccgtcccatgatctgccaatgcgaatgaaaataagagctggtacttcacattcttctacttatatggatgtccagaatataaaattgcatacaannnnnnnnnnnnnnnnnnnnnnnnnnnnnnnnnnnnnnnnnnnnnnnnnnnnnnnnnnnnnnnnnnnnnnnnnnnnnnnnnnnnnnnnnntataatttaaacatgtaaggaaagcccccacccttgtgtagttatagatcaaatacgactccgctttccggagaatgaatttgtgtagtttctgaggaggtgtttgtttggcaaagaaatccccgttacctgtttacggtgtaaacccgaaacgctacgtctgtttggtatgtgtaggccgtaatgggccgccttcgtaaacaattgcaggccagttctcgatcgataaaattctcaaaaaaaaaaaatctcgatctataacacccacacacccctgtaaacggttgtgttactgcacacacctcctcttccatcttcccacgaccccctactcctcgagcagtgccgccgccaccctgaccccttcgagtccggcgtcgccgccaccccgagccttttcaagcccccctccgcttcccccggtcctctcttcctcgtgcaacaccaccagatctgcgccacaccagccgcgggcacgacatgcgtctcctgttagctatcgccaccgcccctgatcgccgccgcagcttgccctcgtcgccggccggaccgttttctgcaaggtgcaggnnnnnnnnnnnnnnnnnnnnnnnnnnnnnnnnnnnnnnnnnnnnnnnnnnnntcatgttcttgtctgctctacttccttccagtcaccagcggcaacgaccccgattcctttacaggcatcaaccaaacaaaacacagatttatccgtcacgtccttgttacaagcgtgatctagttcccttatcgtttacattaccagtctctaatccaaacacctcctgagatgatagattgaactaagcatcttgtgctacaagagtgagaaacttaacatcttgtctggttgagcatgttatgattatagtcactcacatgctaggcacccagttgacagcaacatccccgcttagcagctcattcacttgatagtgtacatcaaccgatctttcgtgagtctcttttctccactagcctattattgactaatattaaattgacactagcagttaataaatgactattttatctctcaaggaaaaccaccccttattgactctatcagttcaactgcttgcagataatatcaagtgagattgaagaccgtgacattgatatgctcaaggatattggagtgcaaattgtagcaagatgtgatggtttgcctcttgctgtcaaagtaatgggaggagtcttgtgtcagaaggacaaaaaacaccatgagtgggagatggttctgaatgattctatatggtcgatatctggtcttcccgaaaagctaaaccatgcaatatatttaagttatgaagatttaccttcgtgtgccaaacaatgctttctgcactactcccttctccctaaaaatacagtgttttttaggggtgaaatcattggcatgtggattagtgaaggatttcttcacgggacctcggacgacttggaagaactaggaagcaagtactataaggagcttatattgaggaatcttatggagccaaatacaaagtatgttgatcaatatgtctgcaacatgcatgatgttgtgcgctcatttgctcaatttgtgtctagagatgaggcactagcagttcacactggagaaactactattgttagtaaacttagtgcacatgggtttcttcggttatctgcagaaatcaaagcatcagaatcagatgggttagactggagttctttgcaagcccaaaagacattaagggcactaatatcagttggttgtataaatatcaagcctggtgactcgttggttcattttccatttctacgaactttacatatatgttctgctgatgttttagcattgcgtgaatctttgcatgagctgaagcacctgaggtacttgtccttaagaaacaccgatatatctagtctgcctgatagcattggtaagatgaaattcttgcagtacattagccttgaaggatgccaacaatttgtgaaacttccacatagctttgtaaagttaggggagctaaggtttcttaacttccgtggaacaagtataagtggcatacctcaggggttttgtgctctaacaaacttgaggatagtgcttgggtttccagcctggatggatggtgattggtgcagtttggaagagctgggtcctctttctcggctcaagaatcttcaattggatggattggagaatataactgcttcctcatctgtagcaatggcaaagcttggcgacaaggtgcatcttaccaacctaagcttaaattgtggtagtatattgggagattatgggctgattaaagaggaagatgatgtctctgagaaagagcaacaacaaattgagaaggtgtttgatgagctctgccctccgccgaggttagaatatcttgacatcaaaggatattttggccgatggctcccaaggtggatgatggcatcatcagttatgccactcaagaacttgaggattctgttcattcaagacctggcttgctgcacacagcttcctgatggcatgtgtcagctcccctatttggagttcattcagatcaaccgtgctccagccatcaagcatgttggtcctgaattcatgcagtcctatcatcaccagagtcctcttccttcccaattggtggctgcatttccgagactgcatgtgatgaacttnnnnnnnnnnnnnnnnnnnnnnnnnnnnnnnnnnnnggagcaagtgcaagcctttcctgtcttgcaggaacttatgctaaaacactgcaaattgaagtgtcttcctcctggccttgcttcccaggcaagggctttgaatgaattatgcatatactatgtccacggtctcatctctctagagaactttccatctctggttgagctggatctggatgaaatccttgacctggagaggatcactaatcttccaagactgcagaagcttaccatcaaaggctgcccaaagcttaaggtgttggaaggtgttcttgcactccagaggctcatactcatggacaaagatatggacactctcccagaatacatgggaagtatagaccctaggcatttggagctatactgcagcctagcactgctcgcttccatagccacaggacaatctagccctgagtgggacaagtacagccatgttgagcatgtcaaggcatatgcacgcgaaggaggtaattcaaggaaatggtatgtcttgtacacagctaaaccctacagcctggagacaaatgtcagcaactctttcatgtccagaggtaatttagcattactcgttcatcttcatttgtctatttattctggttatttgaactactatctttgttttctactttcatcagtatgttggagtttgaatatattcccaactgttccttctgaatacagccttatagataaggacaacaataacatgggagtaacgctactttcatcagcatgtctatgtcaacatagatgtattaccagctttttctctgaagaaaaatagatgactggctttttgtcgttttgtaatgtctatttcttgaccaatgctgcttctgatttggctggaatatgtcatttgctaagttattgttgttctcatacttccccttttcatatgttatttctggattttactacttttcactcttcccttgcaagctatggatcgtattaccactttctcgttttcttcttattcaggaaccttatctttttttgaggacacacaaagatttgagtttgtcttcaaaatgacaagaaaagcctttagctacatctgcagtttgggtgatggggccatcaatggaagatatagacagctacacctttgttgacgggagggtgctgtctttagaagatcgagtggctgttgctttcagaaggttgtattctaatgagccaacagagaccatagcgtcctctgttggtgtgaacgagtcaaccatcatgttggtaacaaagaggttcgttgctgctgtgtgtgagcgagcagagcgccatgagtattggccagagtccagtgcaacggatgggatcaaattcatgtttggcaagatccacaatatgcctaactgttgtggtgttacatatacaactaatatcccatttggatcaaactgtgaccatgagaagaaacagagcactcagatgcaagtcgtggttgatccaaggatgaggttcatgaacatttttgtaccagcaggtagcatgaaccagtcgagccttttgcaggactctgaaatcttcaagggggccgagaagggcgatttgctgaatggcagcaagctgaaggtagcagtagatggatcagaaatcggggaatacataattggtgatgaaggataccctcttctcccgtggctactcacaccttaccaggaagaagacctctcagattccaagatggagttcaatcggagacactccgcagccacaacctgcgcgctgaatgcgatggctaggttcaaaggcacatggaaatacctgcaagaagatacgtggtggccggtcaatcccgacagtgtagttaagataatccgtgtcatagatatggaggatgatgcagccatgccgaggcctgacactgagcaatggaattactgtgaggaagtgcaccagttagaaaatgaggacgccgtcagggcaagggatatgctagcgcaatacttcttggccaccatgtcatccgaaacgggaggtgaattaacacaacttctcctacatcttaatttgttcatttggttgctatgtccactaatttgtcgtgattttttcctcctgttgtttccatccttccatctgtttagtcggcacagtggatgcagaggaggaccatgaactaggtgcaacaggctcaggggatgaaaacatggaacaagaagcagagacaacatcagcagaggaagagagccaatgttaggtaacgttctcctgcttaattttttaggtactactgctagtacattttcctgcttcattatattctaggcacatgttgtgtttaaagtcttgtcattccctcaattccagcaacgtcaaactactggcaatgtgttaagcagaacactagtatctagtagctgaaactcttgtgtagttcgtttaatagcattatgattcagagaaaaataaacttagctgctatactatgcgtggaaataaaattcttgatatagtaaaccctggtgcttggctgcatatctgatataaattaaaaccttggtttgatcaggtgaaagggaagccgcctggcatcgatcctgctggttggagctttagaatgcatgaatccagagaagccgtagcaatggagccagagactaagttgatgctgcagcaggaattgaagttgaatgttttctttagtttggtcatctaccttaggcaaagacaagtattatgtagtctgtactttatgtgtgtgcagtaagctttaactgatggacaaatgtgggtagctgcttggggactatctgcaatttccatccatctgtcgatgcaaactgaagaatttgcagacgtatgtttgggccagtatttttttatccaatgcgtactattaacgaagtccttgatgccaagacataacgagacatgaataactccagtagtagtgaaacaactccagtaaaacatagtcatcatttctttttgcagggtaaaacagagtcatctttgcttcttagctggcttgtttgtctgaagtgcggtggcaattctcatgtaataagtaatcaacttgttcagacataacgaggggggcatttggcagtacttactagcaccaattaattagtactagtataatacattatggaacggagggagtacttctaaaaaagctaaaactgatatcttaagataaatctccctaagatcagccttcaagctccagtagtaggaaaacagagtcatcttttttaaatcggcgtgatgattggttggagacaggaggaggatggggcagatcttccaaccaagatcctaattgccatctctacgtacctacacaaaattccccagggagaaaatcagcttgctagcctcctacacatgcatggatcaactagttcagttccagtgttgttggacttttggacctacacaacaatgtagtactagtagtaaatctttaccagagagcacttcattagcacaaggttccaaagagtgggtaaaccagcaggtcctctgattagcaatgtacgctagttaattattaatcagggtctgaaagctagagctaatttactgtttgtctgcagtctgctcaatatagtaggagggagcatgtttggaggcaggcaaactggggacagaggcatccagttgtcacacattgctagtacgtagtagtttgttattgctggcccattgccagcaccctgcagttgctcgttttcgtttcctcatttccatggaatttatacatattatgtattgtgccctgaagcatttgaagtgcacccagaattcttgatatgacaagcgtaaatttgatttagctggagcagatctactgcgtatgctggttagcagtacggcaagtgtatacgctgtgtattttgaatacaagtagaagctcctaaagacctccagtggtgtcagcccatttcgcttgcattcatcattcctaaattgcgcactgtacttaacccctctaaatgtgaacaatgggatcattttctgcaaatggaatgaagagctgattggttcatcattttggaggctggagcaaggtctgggtgtcaagtgaccgcaacacgaaaatgcaagcccctctggtggaaaggtttgtttggaggtgcaacaagcagctaccaagaaacatgcatgtccgaagacaatagcaactcaggttgatggcttatcaaaggcttgacagtggtcagcgcgtgctcaagaggtcgcacatgtcccttggagctggattcgtcaatcaatgaaataatgacatgacattgctgaggcttgtgttctcctattatttggttttcagtttctaaagttggccccgccgtggcaagaaaaacagtgaacaagtgattgatagaagactgcctgagggttgagataaaatggctatcattccgaagtctcatgaggtcaaagatatttggatgatgtttcctgctgcttacggtcttggccatttctgctgattttgatgcagaactgaaggtgtacatcaaatgcataaggggtgtgtaatgtgtggtagttgtagcagtaatggtgaacatgtacgatcgtttgttgggcgatcgtttgttgctgtaaataaataataccaactgcctcaagtccacactgtcaagtgctgccagagatggtcatgaggatgannnnnnnnnnnnnnnnnnnnnnnnnnnnnnnnnnnnnnnnnnnnnnnnnnnnnnnnnnnnnnnnnnnnnnnnnnnnnnnnnnnnnnnnnnnnnnnnnnnnnnnnnnnnnnnnnnnnnnnnnnnnnnnnnnnnnnnnnnnnnnnnnnnnnnnnnnnnnnnnnnnnnnnnnnnnnnnnnnnnnnnnnnnnnnnnnnnnnnnnnnnnnnnnnnnnnnnnnnnnnnnnnnnnnnnnnnnnnnnnnnnnnnnnnnnnnnnnnnnnnnnnnnnnnnnnnnnnnnnnnnnnnnnnnnnnnnnnnnnnnnnnnnnnnnnnnnnnnnnnnnnnnnnnnnnnnnnnnnnnnnnnnnnnnnnnnnnnnnnnnnnnnnnnnnnnnnnnnnnnnnnnnnnnnnnnnnnnnnnnnnnnnnnnnnnnnnnnnnnnnnnnnnnnnnnnnnnnnnnnnnnnnnnnnnnnnnnnnnnnnnnnnnnnnnnnnnnnnnnnnnnnnnnnnnnnnnnnnnnnnnnnnnnnnnnnnnnnnnnnnnnnnnnnnnnnnnnnnnnnnnnnnnnnnnnnnnnnnnnnnnnnnnnnnnnnnnnnnnnnnnnnnnnnnnnnnnnnnnnnnnnnnnnnnnnnnnnnnnnnnnnnnnnnnnnnnnnnnnnnnnnnnnnnnnnnnnnnnnnnnnnnnnnnnnnnnnnnnnnnnnnnnnnnnnnnnnnnnnnnnnnnnnnnnnnnnnnnnnnnnnnnnnnnnnnnnnnnnnnnnnnnnnnnnnnnnnnnnnnnnnnnnnnnnnnnnnnnnnnnnnnnnnnnnnnnnnnnnnnnnnnnnnnnnnnnnnnnnnnnnnnnnnnnnnnnnnnnnnnnnnnnnnnnnnnnnnnnnnnnnnnnnnnnnnnnnnnnnnnnnnnnnnnnnnnnnnnnnnnnnnnnnnnnnnnnnnnnnnnnnnnnnnnnnnnnnnnnnnnnnnnnnnnnnnnnnnnnnnnnnnnnnnnnnnnnnnnnnnnnnnnnnnnnnnnnnnnnnnnnnnnnnnnnnnnnnnnnnnnnnnnnnnnnnnnnnnnnnnnnnnnnnnnnnnnnnnnnnnnnnnnnnnnnnnnnnnnnnnnnnnnnnnnnnnnnnnnnnnnnnnnnnnnnnnnnnnnnnnnnnnnnnnnnnnnnnnnnnnnnnnnnnnnnnnnnnnnnnnnnnnnnnnnnnnnnnnnnnnnnnnnnnnnnnnnnnnnnnnnnnnnnnnnnnnnnnnnnnnnnnnnnnnnnnnnnnnnnnnnnnnnnnnnnnnnnnnnnnnnnnnnnnnnnnnnnnnnnnnnnnnnnnnnnnnnnnnnnnnnnnnnnnnnnnnnnnnnnnnnnnnnnnnnnnnnnnnnnnnnnnnnnnnnnnnnnnnnnnnnnnnnnnnnnnnnnnnnnnnnnnnnnnnnnnnnnnnnnnnnnnnnnnnnnnnnnnnnnnnnnnnnnnnnnnnnnnnnnnnnnnnnnnnnnnnnnnnnnnnnnnnnnnnnnnnnnnnnnnnnnnnnnnnnnnnnnnnnnnnnnnnnnnnnnnnnnnnnnnnnnnnnnnnnnnnnnnnnnnnnnnnnnnnnnnnnnnnnnnnnnnnnnnnta

SEQ ID NO: 2 - DNA, 19882 bp, Artificial Sequence
  Scaffold 20860
  misc_feature (3)..(109): n is a, c, g, or t
  misc_feature (2725)..(3442): n is a, c, g, or t
  misc_feature (4175)..(4895): n is a, c, g, or t
  misc_feature (7137)..(7359): n is a, c, g, or t
  misc_feature (10601)..(10642): n is a, c, g, or t
  misc_feature (10861)..(10907): n is a, c, g, or t
  misc_feature (11093)..(11136): n is a, c, g, or t
  misc_feature (14248)..(14311): n is a, c, g, or t
  misc_feature (14654)..(14771): n is a, c, g, or t
  misc_feature (15294)..(15332): n is a, c, g, or t
  misc_feature (15544)..(15578): n is a, c, g, or t
  misc_feature (16083)..(16167): n is a, c, g, or t
  misc_feature (16852)..(19881): n is a, c, g, or t
ctnnnnnnnnnnnnnnnnnnnnnnnnnnnnnnnnnnnnnnnnnnnnnnnnnnnnnnnnnnnnnnnnnnnnnnnnnnnnnnnnnnnnnnnnnnnnnnnnnnnnnnnnnnncctcctgggtgatctgaggtgtacgtagcacaagcattttcgttgtttgtgtctgtagttgaacctcctgcatggcaattgtagctattatttcatcgtggcaaatgtagttatgcttacatggcaactgcaagtaagcagttatgacaactatacatttatcagtaatgtatactatagtttccacataatggcagtatacctgcaaatatgatggcaactaaagttaattatcacgacatgaaaactgtatttatgcatacatgaaaactcttcataatcagtgatggcaactgaaacatgatcaatggtggaaactgcatatgccacatgatggcaagagcagtgaaacatgatggcaaatgtagttatcacaacatggcaaatgtaggtaccacatcatggcaactaaatttgccataacttggcaactgctagaccatcaccacatggcaattcattctgaatacacaagttatttttgtcccttgaccattcatggcaggtgctgttgccttgggattgtaaatgcattcattaaccatttactttctccattttctattctcacctgcataatacgttgatggcaggtctcccattgttagttgttgccatgcggtacacgcagttgctgcaaatgtcattttttagtaagtttccctgtttcataatatgatgttctttcttcatactttaccttgatttgcattctctttcgtccgatgtttgttgtcctgattgtgaggcactcgcatttactcctggcgcagttttgccatgggacctctgatggcaaagtataactccatgcaaatgtgtataacaaacatcatacgtttgtcattattctgccttcaaagatggcaaactatcctttttgcttgatacggaaacgcacccatgtctccatattcttgtagtggaggcagcaatggccccgatgaattgcggttgctgtagacatcccatggcgtcgatttgcggctgtctgaaaaaccaaggatacgaaccttcgcctgattccaccccaaaacctagatgcataacgcacagacacctgttgtgttagtttgcattctaccttgcataccctatcttcaatgagcatcacaaaaaatgtagcatctgattttcacttgtcaaactgatttttgggtggcaattggctgcctaatggcaaattcatccagactaatgaggcaaatattgttggaaccacatggcaaatcatgtggtccaaggcggaaactatttttttcccattcggatacatgcccagtgtttctccaaaagcaatccacttgaatttcactagttggcaactactgttggaaccacatggaagattagatgatgcaaaacagcaactaattttcccctctctcctatatctaccaacacacctaactgccatacatcccagcagatatgggataactttggatgaatacgtgtggcaattctggcttttagagacagcagtcaccccttcgatatcaattcgtgtgttaggcatggcaattcgccaaatctcaaattttcaaaccatactgagatatgggatgtgagggtagagacgacagagtgagggcggcaactgcaggtcgtattacaaaaaatgggttccttgacgtattcttggtctacgattttggcgtagtcgaccttgttgccatggcgatttgggtgcagatcggcggagaggaacgagacgagcaggccaacggtaaacgaaggagttggaggaggggttaggggagcggggccagaggtaaacgtgcggacgttggcaattgctgccgcacgatggtgtgcgggccacatatgtggctgcccgatcgttcgggcgctggcggcgcagggggtgtgcgggctggcaagcattattgccgaacgaatcgtgtggcactaaaccttacagcccacacttgtggcagttatcggcgtcctaatcttaatctcagtattcatcttgacatggagtgagtcgccgcagagcgtcaagcttccaattttgtttatctgcatatataagtgatacagtaccaattagtatttcagccaagttcatccgggaaattaaacgaggtccagtcggaaacggaaatttcatcagatctccgcccgtgaccatagtttctacggaggatttccgcctttgctggcctttatcgttgtagccgtgtaggttacaattgattcagttcagatacacacatgatgcatcaacaatagacaggcagcgtcggtcatatcatatcgcactgcaggacacgaaaccaatgaatgagtatcccattctccatggtaggctaaactgctattgctacagaaattaactatgcttttatctttctccattgtcatgtcttatgtttgctcaataaccgacaagggtaatctttgtgctgtgcctccttcgttccacgcgcgtcgatttcagaccccagctcaagaagaaacagaaataaagaaagaaaacagagaaatggagtggagcttctctgcaatgcctccttgcttgatcgcttcatctccgagtgcctgagcactgagcagtgacacgacttcttgggtggaggctaacagaggaaaggccatggaagccatggnnnnnnnnnnnnnnnnnnnnnnnnnnnnnnnnnnnnnnnnnnnnnnnnnnnnnnnnnnnnnnnnnnnnnnnnnnnnnnnnnnnnnnnnnnnnnnnnnnnnnnnnnnnnnnnnnnnnnnnnnnnnnnnnnnnnnnnnnnnnnnnnnnnnnnnnnnnnnnnnnnnnnnnnnnnnnnnnnnnnnnnnnnnnnnnnnnnnnnnnnnnnnnnnnnnnnnnnnnnnnnnnnnnnnnnnnnnnnnnnnnnnnnnnnnnnnnnnnnnnnnnnnnnnnnnnnnnnnnnnnnnnnnnnnnnnnnnnnnnnnnnnnnnnnnnnnnnnnnnnnnnnnnnnnnnnnnnnnnnnnnnnnnnnnnnnnnnnnnnnnnnnnnnnnnnnnnnnnnnnnnnnnnnnnnnnnnnnnnnnnnnnnnnnnnnnnnnnnnnnnnnnnnnnnnnnnnnnnnnnnnnnnnnnnnnnnnnnnnnnnnnnnnnnnnnnnnnnnnnnnnnnnnnnnnnnnnnnnnnnnnnnnnnnnnnnnnnnnnnnnnnnnnnnnnnnnnnnnnnnnnnnnnnnnnnnnnnnnnnnnnnnnnnnnnnnnnnnnnnnnnnnnnnnnnnnnnnnnnnnnnnnnnnnnnnnnnnnnnnnnnnnnnnnnnnnnnnnnnnnnnnnnnnnnnnnnnnnnnnnnnnnnnnnnnnnnnnnnnnnnnnnnnnnnnnnnnnnnnnnnnnnnnnnnnnnnnnnnngctggctatgtagcccctgatcaaactaatatggaaacatgggatgaggatcagttgatcagtacacttcgaagattccttgcagacaagaggtactccaatttgcaaatgactttattccaaagtaatctatagtgcttggtttattttgttggaagatattcttttagcttgcttgctgtatgctgtcgtagaaacttacattcttagaccctctggatgggcgttttgttagtgaaactagttaagccatcaagttccgtgaaacctctataatcatgtaatttattccatatttgaattatttttcgttactagaaaagaaggaactagataaagactagtttgcaagtcagaaatcttacaattgattttcacattttctcaaagtaaaattcctcaaatgaacatcccaattcttacaaatgcctgcatacatattttttgtttttaaaaaagtgtcaatgcctgcgtaaggtttagttttaaagcatatatttacccatcgatacaaagaaaacaaggcaatgcgagctaccatctattcaattctaaaaccaaatgggcctactcttgaaaaaagtgtcaatgcctgcgtaaggatcaccaagcatatgcacttttgggaaactgaaagatagatgttttcttgggtggtgttttagccttttgaagttcacttgaagaaagtgaggatgcttattatactccatataatctgaatttcttgtcnnnnnnnnnnnnnnnnnnnnnnnnnnnnnnnnnnnnnnnnnnnnnnnnnnnnnnnnnnnnnnnnnnnnnnnnnnnnnnnnnnnnnnnnnnnnnnnnnnnnnnnnnnnnnnnnnnnnnnnnnnnnnnnnnnnnnnnnnnnnnnnnnnnnnnnnnnnnnnnnnnnnnnnnnnnnnnnnnnnnnnnnnnnnnnnnnnnnnnnnnnnnnnnnnnnnnnnnnnnnnnnnnnnnnnnnnnnnnnnnnnnnnnnnnnnnnnnnnnnnnnnnnnnnnnnnnnnnnnnnnnnnnnnnnnnnnnnnnnnnnnnnnnnnnnnnnnnnnnnnnnnnnnnnnnnnnnnnnnnnnnnnnnnnnnnnnnnnnnnnnnnnnnnnnnnnnnnnnnnnnnnnnnnnnnnnnnnnnnnnnnnnnnnnnnnnnnnnnnnnnnnnnnnnnnnnnnnnnnnnnnnnnnnnnnnnnnnnnnnnnnnnnnnnnnnnnnnnnnnnnnnnnnnnnnnnnnnnnnnnnnnnnnnnnnnnnnnnnnnnnnnnnnnnnnnnnnnnnnnnnnnnnnnnnnnnnnnnnnnnnnnnnnnnnnnnnnnnnnnnnnnnnnnnnnnnnnnnnnnnnnnnnnnnnnnnnnnnnnnnnnnnnnnnnnnnnnnnnnnnnnnnnnnnnnnnnnnnnnnnnnnnnnnnnnnnnnnnnnnnnnnnnnnnnnnnnnnnnnnnnnnnnnnnnnnnnnnnnnnnnttttatcactgcagtagaagacttacaagccgtgattggactgcaaggcaatgtccgccgactctccctctacttggatgatgtaatagatggcgctacattgggaacatcccggctcttacaagtaagagcgctagcaagatttggtatctcaacatacacacctcctctatcagagttcaagcatctccgagttttaactcttgaatttccagataagcttatgaaacttgacctcagaggaatgtttcatttgttccagttgaggtatctaaaaattgtggcatataattgtggaaaaatagtgctaccaaggaaaattcggagactagagcaattacagacaattgaattaagagcacatgaatctagcatgcttcaagttccatcagatattgttagtttgcaccggttattgcacctggttcttcctattgggataagtttgccctcagggattgggagcatgaaatccctatgtacattgcaaggattcgatctggccatgaactcagtagacaacatcaaagacctcggaaaactgtccaatttaaaggatcttgaaatatctcttatgcactggcagtttttggatgagatggaggcaagaaaacttatgaatattctgatctcttccttaggaaagctttgcaacctcaaatacctgtatatggaatcttatctccctcgtgtatgctcggatgcattgagttcaccatccacttctccccgtcttcttcgcggactacatttacggggttgcatgttatcgagggttcccaagtggattcaggagctccataacctctatgaccttgcactaggggttaaggaggtgttggatgatgatgttggaatcattgcacagttgcactcccttatccacctgcatttgtacatctttggaactcctaaagagagggtcaccatctgcggaacaggattccttgctctcaagcatttcgaagtcacctgccgttggacatcatacctgacgtttgcggcaggagcaatgcccaagctccagaggctcgagatcggattcaatgcacgcgaatgggatcagtatggtgctgcttttgtcggcatcgagaacttgtcaggcctcaaggaagtctctgtacgtattgggggatatggtgccgacgaatcaagtgcaagagctgcgcagtccgtgttgagagatgccattggcatgcacccgagttgtcctagagctaacatcaagtgtgatgagaacatgaatttcacttttgatgactagaaaaaagaggaggttgtgaatactctagcacttgaaggccaaattctggtaagaaccacccaatgaggcggcaactaataaccctaacaccatcgctctctcgttgattttcaataatttccctgcaagttttattttgtgtcatgcctgaaatgtgaaactctttccacatttctacatgaatcaaagattttcatgtgaagttcatgcaaaaaaatatatttaaacatgctcttaatcctagtgtgtttgattgttgtcaacaggatttctatgtcaagctggactgaccaagttgctatcctgcagcggcgtcttggcaccccactcgcttcatgccatcatgtgtaactgaaactcttcgctaagaaatgtggaagacgtgggcctctgtatacgcaggtacatctacgtgcttcgtcgtcacaagaatgtgctgccaccatttaccatatttctgttaagaacctattttctaagacctgttgtacgcactgttaaacttattctgcttgcttggtgtgagcttgagttgtgtgcttgtgtataatcgaatgatgaattggtgaaaaagtgatatgcttctgaaatttcgaagtgttcagctgttatatgtaaatcagggtgtgtgttcatgggaaagcttatccatgtattgatcacgatcggcttcttccaccgatcagatgtgcagatttcacaatgtttccattttagcctttgcaacatctgaagggaaactgcaggcggttggtaccagaaagaaacggtttcagattttatcctgttcttgctggtgaatgagcttctgtttaggctgatgtgtgctgttattacttgatgtgtcccttgcctgatgcactgatgctacagccttatgtggtgctggttagtttttgctggtcaccgtctcaccaccggcctcgccgacaaacgcccatcaccggcgccagtggtcactggtaggcggcgacagcnnnnnnnnnnnnnnnnnnnnnnnnnnnnnnnnnnnnnnnnnnnnnnnnnnnnnnnnnnnnnnnnnnnnnnnnnnnnnnnnnnnnnnnnnnnnnnnnnnnnnnnnnnnnnnnnnnnnnnnnnnnnnnnnnnnnnnnnnnnnnnnnnnnnnnnnnnnnnnnnnnnnnnnnnnnnnnnnnnnnnnnnnnnnnnnnnnnnnnnnnnnnnnnnnnnnnnnnnnnnnnntttttagattaatgccgcctttttgtacgggaaaaattattgtgcaccaggaagatgcatacaatcctacttagtctgtacagaatctatcaacaggtgtggaagaaagaggacaccttcctggttggactttttccagtccaccaatgagtggccaaaacccaaaagcctgatgtctgctccacttgggagcctgtctactcacacactacacagaggccaccagatgatgttgccggtccactgtctgcaagtgctgcagtcttttctcctgcaccacaaagcaatggatggattcacaaatcccctccttttccatattagcaaacacctgtaagtatgtgcctggttacagtttaatctaatcatcattgcccaccatatgcatgatatgggcatctcaccaccaccacaagagaacactaggattatcgcattcggtttcagccattttagctaatgcgggggaataatattatgtgtcgaaccgagagtgagcgtcgtactgtcatggaaaaggtttattaggagtggctatttagttggtgcttgacacttgtgggtgcaattgcaaagctttcccctgtccaccaatattatgtgctgccttttcttttctgaatttaaaagagtgccaacttcagcactaatcagtggtgcagcagcatactggaaccttccagactaactaagtggagtattctgtttgatgaaacttatgttcactaaatatgttaagaggtccattcttttaggaaatccattctgtcttgtagcaagtccatgcgctgtactgtacacaatctctgaaatcataccatattatcctatttgtgaacatatactatacgagtattgtatttttttttcaaccccaaaaacatatattaaagttctttgggaattaaactataaatttagccatatattttcctcttaacatatattatgttttaggtaaaggacaacatgaagtggccatgaagatctgcaacatcctctatcttaacatacatatttgcctcttagccagacaacaagtggattccaccacctccatcccaacaacatgctttatgcctgcacagacagttgacatgttctgagccgttgcttcaacacagtgctccccataggattattaagcaaagctaattaagcaaaagacagcaccatcatagatcacaaatcccttaaggaagaaccacacagatagacatcaggaaattcagaagataacatttccatgaacacctcaggtctacttggcaatagtgctgtggctgacccataataatcatgctgttttgtttagcatatcctccatgcgccctgccattccgacgctaactttgcgggtgcatgaatggttatcagaatatcagaaaggttgctggaatttgtctagtgggaaataaagttgatgtacttgatatataaaaccttggaccagcgagagctgaagattgattagttaatcagaaattagtagatgcagctaccttatggccaaatggtaataagtgatatggccaccttgctctgatcagttggtcagctgcaaagcatgccactttctttcagagtggccatgaagcatgcctttcggtcctctgatccgagaaaaagtaactagtgttagtacatctgattagctatctgatcatagattttgtggctggtaaagatggcacttggagtgtagctgaagggactggtagctcctagtaaattgtttttgatcatgtaatttgaattagtatgtaaaacgtttttctcttacttgatcatgcatcgtatgcaggccatctttaagatgatacattctgtttattttttctgcagtttttccgggttgaccatttctgtcttaatcatgagaacgagtacatttaggtcagtcatacatcacaagtaattaagcatgggaaaaatcaatttgaaaatgcaaaacaaataccaacagccctatcccagttcttctagctagcaccaactcctttgtataacattttggttgatatgaattatgaaatctacttggttgcttcatcaagagaccttgcatacctgaatttctgagagtgacaggtcaatccttgaggtttggacttctggccattcctcatatcattgttcaacttgtcaattgtttttccttcagaaagtaaacttgccaaaaaaaataaatcatttttcttccaacagactgcaagtgggtgatgtgctaatctgcaccgatctatgtccacatctacatgcatcatccttaattaatcttttgtgacttgtgaggttcaccttacctacccagttcagttcatctcatattttttacagtggtgtccaagtccagggcggacctcagttagtaaaactggtaattacctcgttggatccattaaacctgtatgatccagaggtcagccatgcagtgtcctacagagtacagacctaggctaattttcatctgaagtagaggaatgcttggcttatatctgaagcctgagggcaaggcatagattgcagagtaagaaaacttgtgattacatctgatctgactttcttgcagatcggtgcatgcacagaaagaggaagcttctgatgttagttaactcttaatgatctgagcaagtcatcggcgccggccggctgttttctcaaggaaaacaatagaatagaaggtacgcttgcttaggaaggcgtgaccaaggcgtagacctgaacttttgtcgccggtcgaattttctaccgcccttgctgttttctgaatttttacttgcgtgcattttccaccaaggcgcgcgtagacctgcatctcgctgttttctgaatttttgatgcaaattcattttctcaataattctcacagggaattcagctggttcagagctcattctgaccagtgacaacagtgctgtggttactgccgatcactcagcagagtagtaatcacatcacacgcttggagtagagtagaaaacttgtgctgagaaacattacggctgatctgacttttgtgcaggtaggaaacactacagaaagaggaggaagctgccgatcttaattaattcccaagtaatctgaacaagtcactgccgccgccggctgttctctgaagaaaaacaagataaaattatacacttgcttaggcagcaggcatgaatggccaaggcgtagacctgaattttcgtcgccgacacaccattttctactgccacttgtaaatattttttcctccnnnnnnnnnnnnnnnnnnnnnnnnnnnnnnnnnnnnnnnnnngcctgcgacttgggttgcgtactcaagtcattctgaagctggctcttgatgtcagtcagtaattctcatgaaatattcacccgtgttcaaagctcattctgacttgtgacagcggtgtgattagcactgatcacttgggtaaatcctgtttgattatttgcctgtgtaatctcatgattggagctggggggcgccacgtgtcagcctcccccggccgtnnnnnnnnnnnnnnnnnnnnnnnnnnnnnnnnnnnnnnnnnnnnnnngccattaaagtactcaatcaagctcctcatccactgtgatcagaaaggagctatgaaaatgacacaacagaaaatgataccccgcgatctagtctaaacacactggctggctagtagttagtgtaggtgtatatatacatatatatacacatgaatccacctacatgcaggaattccatttaatcnnnnnnnnnnnnnnnnnnnnnnnnnnnnnnnnnnnnnnnnnnnntgaggttggttagccaagagtcaaacccggctgctgagtctgacagacaagctcggatagttagctacagctgatcagcaacctccattcttggtccacaaagaggtttgcttcgatcgatccactgatgtgggttcttgaatgagcgatcgttaattagctggaaatggcggggcgaggcagcggtggtgcactggcggcggtgatcgtgctgctgtcgtggtgctggagtggcgcggcgcagccctcgctgcggtgcggcgacggtgaccttgccgcgctcacagggttctcggccggtcttgatgctccggtggatggatggccggccgtcgctgatgacgatgaggacggctgctgcgcgtggcccggcgtggtctgcggcggcgagcgcgtcgtcggggtggtgctgccgaaccggacgctccggggggaggtggccgcgtcgctcgccgggctgacggcgctccgcgtgctcaacctctccggcaacgcgctgcggggcgcgctcccgcccgggctcctccggctgcgccgcctcgaggtgctcgacgtcagctccaacgcgctggccggcgcgatcgggctcgagctccagctcccggcggcgcgggtgttcaacgtgtcgtacaacgcgttcaacggcagccacccggtgctccccggcgccgtgaacctcacggcgtacgacgcgtccggcaacggcttcgaggggcccctggacgccgccgcggtctgcgcgtcctcgccggggctgcgggtcctgcggctgtccatgaacaggctctccggcgacttccctgtcgggttcggccaatgccggtcgcttctcgagctctcgctcgacggcaacggcatcaccggcgccctcccagatgacctctttgccgcgacgtcgctgcggtacctcaccctccacaccaactccatctccggcgagatcccgtcggggctccgcaacctcaccggcctcgtccgcctcgacctctccttcaacgcattctccggtgcgctgcccgaggctttcgacgcgctcgccggcacgctcgaggagctctcggcgccgagcaacctgctcaccggcggccttcccgccacgctctcgcggtgcgtgaaccttcgggtactcaacctccgcaacaacacgctcaccggcgccatcggcctcgacttccgcgccgtcaatagcctcgtctacctcgacctgggcgtcaacaagttcacgggcctcatcccggcgagcctccccgcgtgcgccggcatgacggcgctcaacctcggccgaaacctcctcaccggcgagataccgccgtcgttcgccgcgtttccgtcgctctccttcctgtccctcaccggcaacggattctccaacgtcacgtcggcgttgaggatactgcagcgcttgcccaacctgacgagcctcgtgctcaccaagaacttccgcggcggcgaggcgatgccagaggacggcatcgatgggttcgccaagatggaggtgctcgtcattgccaactgcgagctcaccggcgggatcccggcgtggctcgctgggctccggaggctcaaggtgctcgacatctcgtggaaccggctcgccggcccgatcccgccgctgctcggcgagctcgaccgcctcttctacctcgacatatcgaacaactcgctgcagggggagatcccggccagcctgacgcggatgccggcgctgctggccggcagcggcaatggccgcggcgacgacgacgagaaggtgcaggacttcccgttctttatgcgccggaacgtgtcggcgaaaggacggcagtataaccaggtgagcagcttcccggcgtcgctcgtgctggcgcggaacaacctcaccggcggcgtgccggcgggtctgggagcgctggccagattgcacatcgtcgacctgagctggaacggcttctcggggcccatcccgccggagctgtcggggatgacgagcctcgagtccctcgacgtgtcgcacaacgcgctctccggcgccatcccggcgtctctgacgcggctcagcttcctctcccacttcgccgtcgcgtacaacaacctctccggcgagatccccatcggcggccagttcttcaccttctcgagcgcggacttcgccggtaacccgttcctgtgcggtttccacgtgggacggaagtgcgagcggaagatagatgatcaggccacggacggcagcacgaccgggagcaatgacggccgaaggagcgccggcgtcgtggcggcgatatgcgtcggcacaacgctgctggtcgccgtgggccttgccgcgacgtggcgggcgtggtcgaggcggcggcaggaggacaacgcctgcagggtggccgccggtgacgacgaggaaagcaccgactcgtccgcggcgaggtcgtcgacgctggtgctcctcttccccggcgacgacgaagaggaggagacgacggtgatcacgcttgaccaggtggttaaggcgacgggggacttcgacgagacccgcatcgtcgggtgcggcgggttcggcatggtgtaccgcgcgacgctggcggaagggcgcgacgtcgccgtgaagcgcctctccggcgacttccaccagatggagcgcgagttccgggcggaggtggaggcgctctcccgcgtgcgccaccgcaacctcgtcgccctccgcggctactgccgcctcggcaaggacgtccgcctcctcatctacccgtacatggagaacggcagcctggaccactggctccacgagcgcgcggacgccggcgacgccctgccatggccggcgcggctgcggatcgccctgggcgcggcgcgcgggctggcgcacctgcacggcggcggcgcgcgggtgatgcaccgggacgtgaagtcgagcaacatcctgctggacgcggcgatggaggcgcggctgggtgacttcgggctggcgcggctcgcgcgcgggagcgacgacacgcatgtgacgacggacctggtgggcacgctggggtacatcccgccggagtacgggcactcgccggcggcgacgtaccggggcgacgtgtacagcatgggggtggtgctggtggagctggtgacggggcggcggcccgtggacatggcnnnnnnnnnnnnnnnnnnnnnnnnnnnnnnnnnnnnnnnnnnnnnnnnnnnnnnnnnnnnnnnncgcgaggccgtggacgccgccgtaccggcgcggcaccgggaggaggcggcgagggtgctggagctggcgtgcgcatgcgtcagcgaggaccccaaggcgaggcccacggcgcagcagctcgtcgagcggctcgacgccatcgccggcgccggcgccgccccggagattcgctccggcacggtagataactgaagcttgtgtagataactgaatcgatactagagtagctagctgtgacagtaatatctcgtgtaaattttgacaagagttgattcgtgtataaagattgaatggatgatgattaacgcagcgggattgctatatctatattcttgatttcacnnnnnnnnnnnnnnnnnnnnnnnnnnnnnnnnnnnnnnnnnnnnnnnnnnnnnnnnnnnnnnnnnnnnnnnnnnnnnnnnnnnnnnnnnnnnnnnnnnnnnnnnnnnnnnnnnnnnnngtaattccacgtacgatgtttcctagacgatatgcgcacgacactcaaatcgaacagtgtagcagtgctggccagttgcatccaatggtacctgtagcatgtcgtccgtaaatcggccgcaggctgtcgttcacgtagcagcgctcattcagagtttcaactctgcaccgcatccaaaaagttaatttaaatacgaaaactcaaaacagtgcccgggctcatctgctccctctcagcaaaaaattcaaaaaaaatactaaaaaaattcaaaaaattccaaatttttttgtagtggtagataaatttacgcgtgaggtgcgcaccaaaattcaacttatttggacatctgagcagctctcggcaaaaaagacaaatcgggtcaaaacagtgcatgaacagtaaacatttttacagaccctgattttgtcttttttgccgagagctgctcagatgctcaaatgagttgaattttggtgtgcacctcacgcgtcaaattatctaccaccacaaaaatatttggaannnnnnnnnnnnnnnnnnnnnnnnnnnnnnnnnnnnnnnctaagcggaggtgtagatgagcccgggtgcatattagccgcactcatttaaataagaacacacaatacattcctcacaaaaaacaaaccaacaagcaacactttttcccgccaaaaacaaaccaacatgcatttcaaccccgcaccgattccaaagggataatttgaagttttgatgtccttagaaacataattgacagactgatctcttannnnnnnnnnnnnnnnnnnnnnnnnnnnnnnnnnncaactaaagaactagccacggcacctggaatggctgatcttgccataatggacatgctggacgctgcccaccggcgtctcatggaagccctttgcgatcgaaacgaaggataagctaaactggtttatgggaaaaggaccaatagtcatttttcgaaatacttgtttttccggtttttgggaaaccaagtttttttatccatggattagttagactaaccaaacatggttttgggtggttagatgcctaaacatgattaacggaaactggtttggtataaccatcgtatcgaaacaacgccttagtgttaaaaggtgcctccatgtaatttcaaagttgcctacctatgatgctcagttgcttatatatgacaaaagttgtgtgccatcatttctaagttttctacaatatacttgctaggtgaattcactagtacacatgattcaagaaagttgcttatgtttggcattaaagttgcctcatctagcattgaagttgattttgnnnnnnnnnnnnnnnnnnnnnnnnnnnnnnnnnnnnnnnnnnnnnnnnnnnnnnnnnnnnnnnnnnnnnnnnnnnnnnnnnnnnnggtccactatagagctcgtatgtagtcgtttctttctcgcctaactaatttttttatgaggcgatacagctgagatcagccaacagttcgagcacttagcacaatgtgccacttaaccgcttcttcaaccccaggatgtgatgagttataactttaaaaaattggaacgaaataaaatggaatgacgtcagcacatgcttctattcctccaaaatagaagaagattcccagtaattctaaatatactaaacctagctaggattcttttttacagtttttttgactttttcttgcagtgaaaactcagccaatgggaagccgacacgttaattagcggggaaattgctgggtacgccttgggtgcacttagcgatttgtgtcgatagcgattagtggattggttttctcttctcctcccgattacctccgcgtgtcgatgcttctctcgaaggcccgggtgggctctcggcctccaccgcccaccgctcaaccctcgattcaccgattcaccgccatacctccctataaattgctcccgtctctcaagctcgcttcagcgcccatacccatcacgcagcgcccacacgcaccagcagggagcggcggcgacggccatgggaggcctcagccagcaggtccggacgaggtggtgctggcagtcggcgaggtcccctcggcgcgcagnnnnnnnnnnnnnnnnnnnnnnnnnnnnnnnnnnnnnnnnnnnnnnnnnnnnnnnnnnnnnnnnnnnnnnnnnnnnnnnnnnnnnnnnnnnnnnnnnnnnnnnnnnnnnnnnnnnnnnnnnnnnnnnnnnnnnnnnnnnnnnnnnnnnnnnnnnnnnnnnnnnnnnnnnnnnnnnnnnnnnnnnnnnnnnnnnnnnnnnnnnnnnnnnnnnnnnnnnnnnnnnnnnnnnnnnnnnnnnnnnnnnnnnnnnnnnnnnnnnnnnnnnnnnnnnnnnnnnnnnnnnnnnnnnnnnnnnnnnnnnnnnnnnnnnnnnnnnnnnnnnnnnnnnnnnnnnnnnnnnnnnnnnnnnnnnnnnnnnnnnnnnnnnnnnnnnnnnnnnnnnnnnnnnnnnnnnnnnnnnnnnnnnnnnnnnnnnnnnnnnnnnnnnnnnnnnnnnnnnnnnnnnnnnnnnnnnnnnnnnnnnnnnnnnnnnnnnnnnnnnnnnnnnnnnnnnnnnnnnnnnnnnnnnnnnnnnnnnnnnnnnnnnnnnnnnnnnnnnnnnnnnnnnnnnnnnnnnnnnnnnnnnnnnnnnnnnnnnnnnnnnnnnnnnnnnnnnnnnnnnnnnnnnnnnnnnnnnnnnnnnnnnnnnnnnnnnnnnnnnnnnnnnnnnnnnnnnnnnnnnnnnnnnnnnnnnnnnnnnnnnnnnnnnnnnnnnnnnnnnnnnnnnnnnnnnnnnnnnnnnnnnnnnnnnnnnnnnnnnnnnnnnnnnnnnnnnnnnnnnnnnnnnnnnnnnnnnnnnnnnnnnnnnnnnnnnnnnnnnnnnnnnnnnnnnnnnnnnnnnnnnnnnnnnnnnnnnnnnnnnnnnnnnnnnnnnnnnnnnnnnnnnnnnnnnnnnnnnnnnnnnnnnnnnnnnnnnnnnnnnnnnnnnnnnnnnnnnnnnnnnnnnnnnnnnnnnnnnnnnnnnnnnnnnnnnnnnnnnnnnnnnnnnnnnnnnnnnnnnnnnnnnnnnnnnnnnnnnnnnnnnnnnnnnnnnnnnnnnnnnnnnnnnnnnnnnnnnnnnnnnnnnnnnnnnnnnnnnnnnnnnnnnnnnnnnnnnnnnnnnnnnnnnnnnnnnnnnnnnnnnnnnnnnnnnnnnnnnnnnnnnnnnnnnnnnnnnnnnnnnnnnnnnnnnnnnnnnnnnnnnnnnnnnnnnnnnnnnnnnnnnnnnnnnnnnnnnnnnnnnnnnnnnnnnnnnnnnnnnnnnnnnnnnnnnnnnnnnnnnnnnnnnnnnnnnnnnnnnnnnnnnnnnnnnnnnnnnnnnnnnnnnnnnnnnnnnnnnnnnnnnnnnnnnnnnnnnnnnnnnnnnnnnnnnnnnnnnnnnnnnnnnnnnnnnnnnnnnnnnnnnnnnnnnnnnnnnnnnnnnnnnnnnnnnnnnnnnnnnnnnnnnnnnnnnnnnnnnnnnnnnnnnnnnnnnnnnnnnnnnnnnnnnnnnnnnnnnnnnnnnnnnnnnnnnnnnnnnnnnnnnnnnnnnnnnnnnnnnnnnnnnnnnnnnnnnnnnnnnnnnnnnnnnnnnnnnnnnnnnnnnnnnnnnnnnnnnnnnnnnnnnnnnnnnnnnnnnnnnnnnnnnnnnnnnnnnnnnnnnnnnnnnnnnnnnnnnnnnnnnnnnnnnnnnnnnnnnnnnnnnnnnnnnnnnnnnnnnnnnnnnnnnnnnnnnnnnnnnnnnnnnnnnnnnnnnnnnnnnnnnnnnnnnnnnnnnnnnnnnnnnnnnnnnnnnnnnnnnnnnnnnnnnnnnnnnnnnnnnnnnnnnnnnnnnnnnnnnnnnnnnnnnnnnnnnnnnnnnnnnnnnnnnnnnnnnnnnnnnnnnnnnnnnnnnnnnnnnnnnnnnnnnnnnnnnnnnnnnnnnnnnnnnnnnnnnnnnnnnnnnnnnnnnnnnnnnnnnnnnnnnnnnnnnnnnnnnnnnnnnnnnnnnnnnnnnnnnnnnnnnnnnnnnnnnnnnnnnnnnnnnnnnnnnnnnnnnnnnnnnnnnnnnnnnnnnnnnnnnnnnnnnnnnnnnnnnnnnnnnnnnnnnnnnnnnnnnnnnnnnnnnnnnnnnnnnnnnnnnnnnnnnnnnnnnnnnnnnnnnnnnnnnnnnnnnnnnnnnnnnnnnnnnnnnnnnnnnnnnnnnnnnnnnnnnnnnnnnnnnnnnnnnnnnnnnnnnnnnnnnnnnnnnnnnnnnnnnnnnnnnnnnnnnnnnnnnnnnnnnnnnnnnnnnnnnnnnnnnnnnnnnnnnnnnnnnnnnnnnnnnnnnnnnnnnnnnnnnnnnnnnnnnnnnnnnnnnnnnnnnnnnnnnnnnnnnnnnnnnnnnnnnnnnnnnnnnnnnnnnnnnnnnnnnnnnnnnnnnnnnnnnnnnnnnnnnnnnnnnnnnnnnnnnnnnnnnnnnnnnnnnnnnnnnnnnnnnnnnnnnnnnnnnnnnnnnnnnnnnnnnnnnnnnnnnnnnnnnnnnnnnnnnnnnnnnnnnnnnnnnnnnnnnnnnnnnnnnnnnnnnnnnnnnnnnnnnnnnnnnnnnnnnnnnnnnnnnnnnnnnnnnnnnnnnnnnnnnnnnnnnnnnnnnnnnnnnnnnnnnnnnnnnnnnnnnnnnnnnnnnnnnnnnnnnnnnnnnnnnnnnnnnnnnnnnnnnnnnnnnnnnnnnnnnnnnnnnnnnnnnnnnnnnnnnnnnnnnnnnnnnnnnnnnnnnnnnnnnnnnnnnnnnnnnnnnnnnnnnnnnnnnnnnnnnnnnnnnnnnnnnnnnnnnnnnnnnnnnnnnnnnnnnnnnnnnnnnnnnnnnnnnnnnnnnnnnnnnnnnnnnnnnnnnnnnnnnnnnnnnnnnnnnnnnnnnnnnnnnnnnnnnnnnnnnnnnnnnnnnnnnnnnnnnnnnnnnnnnnnnnnnnnnnnnnnnnnnnnnnnnnnnnnnnnnnnnnnnnnnnnnnnnnnnnnnnnnnnnnnnnnnnnnnnnnnnnnnnnnnnnnnnnnnnnnnnnnnnnnnnnnnnnnnnnnnnnnnnnnnnnnnnnnnnnnnnnnnnnnnnnnnnnnnnnnnnnnnnnnnnnnnnnnnnnna

SEQ ID NO: 3 - DNA, 26399 bp, Artificial Sequence
  Scaffold 00757
  misc_feature (2)..(1078): n is a, c, g, or t
  misc_feature (1095)..(6458): n is a, c, g, or t
  misc_feature (7119)..(7190): n is a, c, g, or t
  misc_feature (7932)..(7953): n is a, c, g, or t
  misc_feature (12777)..(12810): n is a, c, g, or t
  misc_feature (13081)..(13182): n is a, c, g, or t
  misc_feature (13241)..(13344): n is a, c, g, or t
  misc_feature (16856)..(16913): n is a, c, g, or t
  misc_feature (19969)..(20444): n is a, c, g, or t
  misc_feature (20576)..(20757): n is a, c, g, or t
  misc_feature (22819)..(23732): n is a, c, g, or t
  misc_feature (23920)..(26399): n is a, c, g, or t
gnnnnnnnnnnnnnnnnnnnnnnnnnnnnnnnnnnnnnnnnnnnnnnnnnnnnnnnnnnnnnnnnnnnnnnnnnnnnnnnnnnnnnnnnnnnnnnnnnnnnnnnnnnnnnnnnnnnnnnnnnnnnnnnnnnnnnnnnnnnnnnnnnnnnnnnnnnnnnnnnnnnnnnnnnnnnnnnnnnnnnnnnnnnnnnnnnnnnnnnnnnnnnnnnnnnnnnnnnnnnnnnnnnnnnnnnnnnnnnnnnnnnnnnnnnnnnnnnnnnnnnnnnnnnnnnnnnnnnnnnnnnnnnnnnnnnnnnnnnnnnnnnnnnnnnnnnnnnnnnnnnnnnnnnnnnnnnnnnnnnnnnnnnnnnnnnnnnnnnnnnnnnnnnnnnnnnnnnnnnnnnnnnnnnnnnnnnnnnnnnnnnnnnnnnnnnnnnnnnnnnnnnnnnnnnnnnnnnnnnnnnnnnnnnnnnnnnnnnnnnnnnnnnnnnnnnnnnnnnnnnnnnnnnnnnnnnnnnnnnnnnnnnnnnnnnnnnnnnnnnnnnnnnnnnnnnnnnnnnnnnnnnnnnnnnnnnnnnnnnnnnnnnnnnnnnnnnnnnnnnnnnnnnnnnnnnnnnnnnnnnnnnnnnnnnnnnnnnnnnnnnnnnnnnnnnnnnnnnnnnnnnnnnnnnnnnnnnnnnnnnnnnnnnnnnnnnnnnnnnnnnnnnnnnnnnnnnnnnnnnnnnnnnnnnnnnnnnnnnnnnnnnnnnnnnnnnnnnnnnnnnnnnnnnnnnnnnnnnnnnnnnnnnnnnnnnnnnnnnnnnnnnnnnnnnnnnnnnnnnnnnnnnnnnnnnnnnnnnnnnnnnnnnnnnnnnnnnnnnnnnnnnnnnnnnnnnnnnnnnnnnnnnnnnnnnnnnnnnnnnnnnnnnnnnnnnnnnnnnnnnnnnnnnnnnnnnnnnnnnnnnnnnnnnnnnnnnnnnnnnnnnnnnnnnnnnnnnnnnnnnnnnnnnnnnnnnnnnnnnnnnnnnnnnnnnnnnnnnnnnnnnnnnnnnnnnnnnnnnnnnnnnnnnnnnnnnnnnnnnnnnnnnnnnnnnnnnnnnnnnnnnnnnnnnnnnnnnnnccggccattaaacgttnnnnnnnnnnnnnnnnnnnnnnnnnnnnnnnnnnnnnnnnnnnnnnnnnnnnnnnnnnnnnnnnnnnnnnnnnnnnnnnnnnnnnnnnnnnnnnnnnnnnnnnnnnnnnnnnnnnnnnnnnnnnnnnnnnnnnnnnnnnnnnnnnnnnnnnnnnnnnnnnnnnnnnnnnnnnnnnnnnnnnnnnnnnnnnnnnnnnnnnnnnnnnnnnnnnnnnnnnnnnnnnnnnnnnnnnnnnnnnnnnnnnnnnnnnnnnnnnnnnnnnnnnnnnnnnnnnnnnnnnnnnnnnnnnnnnnnnnnnnnnnnnnnnnnnnnnnnnnnnnnnnnnnnnnnnnnnnnnnnnnnnnnnnnnnnnnnnnnnnnnnnnnnnnnnnnnnnnnnnnnnnnnnnnnnnnnnnnnnnnnnnnnnnnnnnnnnnnnnnnnnnnnnnnnnnnnnnnnnnnnnnnnnnnnnnnnnnnnnnnnnnnnnnnnnnnnnnnnnnnnnnnnnnnnnnnnnnnnnnnnnnnnnnnnnnnnnnnnnnnnnnnnnnnnnnnnnnnnnnnnnnnnnnnnnnnnnnnnnnnnnnnnnnnnnnnnnnnnnnnnnnnnnnnnnnnnnnnnnnnnnnnnnnnnnnnnnnnnnnnnnnnnnnnnnnnnnnnnnnnnnnnnnnnnnnnnnnnnnnnnnnnnnnnnnnnnnnnnnnnnnnnnnnnnnnnnnnnnnnnnnnnnnnnnnnnnnnnnnnnnnnnnnnnnnnnnnnnnnnnnnnnnnnnnnnnnnnnnnnnnnnnnnnnnnnnnnnnnnnnnnnnnnnnnnnnnnnnnnnnnnnnnnnnnnnnnnnnnnnnnnnnnnnnnnnnnnnnnnnnnnnnnnnnnnnnnnnnnnnnnnnnnnnnnnnnnnnnnnnnnnnnnnnnnnnnnnnnnnnnnnnnnnnnnnnnnnnnnnnnnnnnnnnnnnnnnnnnnnnnnnnnnnnnnnnnnnnnnnnnnnnnnnnnnnnnnnnnnnnnnnnnnnnnnnnnnnnnnnnnnnnnnnnnnnnnnnnnnnnnnnnnnnnnnnnnnnnnnnnnnnnnnnnnnnnnnnnnnnnnnnnnnnnnnnnnnnnnnnnnnnnnnnnnnnnnnnnnnnnnnnnnnnnnnnnnnnnnnnnnnnnnnnnnnnnnnnnnnnnnnnnnnnnnnnnnnnnnnnnnnnnnnnnnnnnnnnnnnnnnnnnnnnnnnnnnnnnnnnnnnnnnnnnnnnnnnnnnnnnnnnnnnnnnnnnnnnnnnnnnnnnnnnnnnnnnnnnnnnnnnnnnnnnnnnnnnnnnnnnnnnnnnnnnnnnnnnnnnnnnnnnnnnnnnnnnnnnnnnnnnnnnnnnnnnnnnnnnnnnnnnnnnnnnnnnnnnnnnnnnnnnnnnnnnnnnnnnnnnnnnnnnnnnnnnnnnnnnnnnnnnnnnnnnnnnnnnnnnnnnnnnnnnnnnnnnnnnnnnnnnnnnnnnnnnnnnnnnnnnnnnnnnnnnnnnnnnnnnnnnnnnnnnnnnnnnnnnnnnnnnnnnnnnnnnnnnnnnnnnnnnnnnnnnnnnnnnnnnnnnnnnnnnnnnnnnnnnnnnnnnnnnnnnnnnnnnnnnnnnnnnnnnnnnnnnnnnnnnnnnnnnnnnnnnnnnnnnnnnnnnnnnnnnnnnnnnnnnnnnnnnnnnnnnnnnnnnnnnnnnnnnnnnnnnnnnnnnnnnnnnnnnnnnnnnnnnnnnnnnnnnnnnnnnnnnnnnnnnnnnnnnnnnnnnnnnnnnnnnnnnnnnnnnnnnnnnnnnnnnnnnnnnnnnnnnnnnnnnnnnnnnnnnnnnnnnnnnnnnnnnnnnnnnnnnnnnnnnnnnnnnnnnnnnnnnnnnnnnnnnnnnnnnnnnnnnnnnnnnnnnnnnnnnnnnnnnnnnnnnnnnnnnnnnnnnnnnnnnnnnnnnnnnnnnnnnnnnnnnnnnnnnnnnnnnnnnnnnnnnnnnnnnnnnnnnnnnnnnnnnnnnnnnnnnnnnnnnnnnnnnnnnnnnnnnnnnnnnnnnnnnnnnnnnnnnnnnnnnnnnnnnnnnnnnnnnnnnnnnnnnnnnnnnnnnnnnnnnnnnnnnnnnnnnnnnnnnnnnnnnnnnnnnnnnnnnnnnnnnnnnnnnnnnnnnnnnnnnnnnnnnnnnnnnnnnnnnnnnnnnnnnnnnnnnnnnnnnnnnnnnnnnnnnnnnnnnnnnnnnnnnnnnnnnnnnnnnnnnnnnnnnnnnnnnnnnnnnnnnnnnnnnnnnnnnnnnnnnnnnnnnnnnnnnnnnnnnnnnnnnnnnnnnnnnnnnnnnnnnnnnnnnnnnnnnnnnnnnnnnnnnnnnnnnnnnnnnnnnnnnnnnnnnnnnnnnnnnnnnnnnnnnnnnnnnnnnnnnnnnnnnnnnnnnnnnnnnnnnnnnnnnnnnnnnnnnnnnnnnnnnnnnnnnnnnnnnnnnnnnnnnnnnnnnnnnnnnnnnnnnnnnnnnnnnnnnnnnnnnnnnnnnnnnnnnnnnnnnnnnnnnnnnnnnnnnnnnnnnnnnnnnnnnnnnnnnnnnnnnnnnnnnnnnnnnnnnnnnnnnnnnnnnnnnnnnnnnnnnnnnnnnnnnnnnnnnnnnnnnnnnnnnnnnnnnnnnnnnnnnnnnnnnnnnnnnnnnnnnnnnnnnnnnnnnnnnnnnnnnnnnnnnnnnnnnnnnnnnnnnnnnnnnnnnnnnnnnnnnnnnnnnnnnnnnnnnnnnnnnnnnnnnnnnnnnnnnnnnnnnnnnnnnnnnnnnnnnnnnnnnnnnnnnnnnnnnnnnnnnnnnnnnnnnnnnnnnnnnnnnnnnnnnnnnnnnnnnnnnnnnnnnnnnnnnnnnnnnnnnnnnnnnnnnnnnnnnnnnnnnnnnnnnnnnnnnnnnnnnnnnnnnnnnnnnnnnnnnnnnnnnnnnnnnnnnnnnnnnnnnnnnnnnnnnnnnnnnnnnnnnnnnnnnnnnnnnnnnnnnnnnnnnnnnnnnnnnnnnnnnnnnnnnnnnnnnnnnnnnnnnnnnnnnnnnnnnnnnnnnnnnnnnnnnnnnnnnnnnnnnnnnnnnnnnnnnnnnnnnnnnnnnnnnnnnnnnnnnnnnnnnnnnnnnnnnnnnnnnnnnnnnnnnnnnnnnnnnnnnnnnnnnnnnnnnnnnnnnnnnnnnnnnnnnnnnnnnnnnnnnnnnnnnnnnnnnnnnnnnnnnnnnnnnnnnnnnnnnnnnnnnnnnnnnnnnnnnnnnnnnnnnnnnnnnnnnnnnnnnnnnnnnnnnnnnnnnnnnnnnnnnnnnnnnnnnnnnnnnnnnnnnnnnnnnnnnnnnnnnnnnnnnnnnnnnnnnnnnnnnnnnnnnnnnnnnnnnnnnnnnnnnnnnnnnnnnnnnnnnnnnnnnnnnnnnnnnnnnnnnnnnnnnnnnnnnnnnnnnnnnnnnnnnnnnnnnnnnnnnnnnnnnnnnnnnnnnnnnnnnnnnnnnnnnnnnnnnnnnnnnnnnnnnnnnnnnnnnnnnnnnnnnnnnnnnnnnnnnnnnnnnnnnnnnnnnnnnnnnnnnnnnnnnnnnnnnnnnnnnnnnnnnnnnnnnnnnnnnnnnnnnnnnnnnnnnnnnnnnnnnnnnnnnnnnnnnnnnnnnnnnnnnnnnnnnnnnnnnnnnnnnnnnnnnnnnnnnnnnnnnnnnnnnnnnnnnnnnnnnnnnnnnnnnnnnnnnnnnnnnnnnnnnnnnnnnnnnnnnnnnnnnnnnnnnnnnnnnnnnnnnnnnnnnnnnnnnnnnnnnnnnnnnnnnnnnnnnnnnnnnnnnnnnnnnnnnnnnnnnnnnnnnnnnnnnnnnnnnnnnnnnnnnnnnnnnnnnnnnnnnnnnnnnnnnnnnnnnnnnnnnnnnnnnnnnnnnnnnnnnnnnnnnnnnnnnnnnnnnnnnnnnnnnnnnnnnnnnnnnnnnnnnnnnnnnnnnnnnnnnnnnnnnnnnnnnnnnnnnnnnnnnnnnnnnnnnnnnnnnnnnnnnnnnnnnnnnnnnnnnnnnnnnnnnnnnnnnnnnnnnnnnnnnnnnnnnnnnnnnnnnnnnnnnnnnnnnnnnnnnnnnnnnnnnnnnnnnnnnnnnnnnnnnnnnnnnnnnnnnnnnnnnnnnnnnnnnnnnnnnnnnnnnnnnnnnnnnnnnnnnnnnnnnnnnnnnnnnnnnnnnnnnnnnnnnnnnnnnnnnnnnnnnnnnnnnnnnnnnnnnnnnnnnnnnnnnnnnnnnnnnnnnnnnnnnnnnnnnnnnnnnnnnnnnnnnnnnnnnnnnnnnnnnnnnnnnnnnnnnnnnnnnnnnnnnnnnnnnnnnnnnnnnnnnnnnnnnnnnnnnnnnnnnnnnnnnnnnnnnnnnnnnnnnnnnnnnnnnnnnnnnnnnnnnnnnnnnnnnnnnnnnnnnnnnnnnnnnnnnnnnnnnnnnnnnnnnnnnnnnnnnnnnnnnnnnnnnnnnnnnnnnnnnnnnnnnnnnnnnnnnnnnnnnnnnnnnnnnnnnnnnnnnnnnnnnnnnnnnnnnnnnnnnnnnnnnnnnnnnnnnnnnnnnnnnnnnnnnnnnnnnnnnnnnnnnnnnnnnnnnnnnnnnnnnnnnnnnnnnnnnnnnnnnnnnnnnnnnnnnnnnnnnnnnnnnnnnnnnnnnnnnnnnnnnnnnnnnnnnnnnnnnnnnnnnnnnnnnnnnnnnnnnnnnnnnnnnnnnnnnnnnnnnnnnnnnnnnnnnnnnnnnnnnnnnnnnnnnnnnnnnnnnnnnnnnnnnnnnnnnnnnnnnnnnnnnnnnnnnnnnnnnnnnnnnnnnnnnnnnnnnnnnnnnnnnnnnnnnnnnnnnnnnnnnnnnnnnnnnnnnnnnnnnnnnnnnnnnnnnnnnnnnnnnnnnnnnnnnnnnnnnnnnnnnnnnnnnnnnnnnnnnnnnnnnnnnnnnnnnnnnnnnnnnnnnnnnnnnnnnnnnnnnnnnnnnnnnnnnnnnnnnnnnnnnnnnnnnnnnnnnnnnnnnnnnnnnnnnnnnnnnnnnnnnnnnnnnnnnnnnnnnnnnnnnnnnnnnnnnnnnnnnnnnnnnnnnnnnnnnnnnnnnnnnnnnnnnnnnnnnnnnnnnnnnnnnnnnnnnnnnnnnnnnnnnnnnnnnnnnnnnnnnnnnnnnnnnnnnnnnnnnnnnnnnnnnnnnnnnnnnnnnnnnnnnnnnnnnnnnnnnnnnnnnnnnnnnnnnnnnnnnnnnnnnnnnnnnnnnnnnnnnnnnnnnnnnnnnnnnnnnnnnnnnnnnnnnnnnnnnnnnnnnnnnnnnnnnnnnnnnnnnnnnnnnnnnnnnnnnnnnnnnnnnnnnnnnnnnnnnnnnnnnnnnnnnnnnnnnnnnnnnnnnnnnnnnnnnnnnnnnnnnnnnnnnnnnnnnnnnnnnnnnnnnnnnnnnnnnnnnnnnnnnnnnnnnnnnnnnnnnnnagcatgtattttgttaaccggcgtgaacccaacctttatctgatctaaatttagttgtagcaaaatgtatgattaaaggccacaatgttgatttttgtaaagaaaactgtctggtagttttgcattagtgccattcaaaaaaaaatgtgacttttaaaaaacagttcacatacttcaaaaaatgctcgtaatatttttttaaattcaataaaatgtacgaataattggtatagtttaataaaaaaaatagaggtaccaaaaaatgtacttgacatttttaaaaacacgcatttccaaacatattgtgacattaaaacaatgcttatacaatgtaacaaaaaagtttgtgtaactgaaaagaatgtttcttaccattaaaaaacatgtgtgagcgatttggaaaaatgtccacgcattttaaaattatgttgatgaaactttgaagaaaacaatcatacaatgtacaaaagtgttctcttagttaaagaagtgtttcgtagcattcaaaaaaaattcaacgtgtaattagaaaacatttaacacgcatttgaaacatttcacacatgtatttgaaaaaaattcaatctgtaccaaagatgttagcatgtacacaaaaaaaatgaaaacatgtattgaaaaagttcgaaatttatttgaaaannnnnnnnnnnnnnnnnnnnnnnnnnnnnnnnnnnnnnnnnnnnnnnnnnnnnnnnnnnnnnnnnnnnnnnngaaagaaaatctaataaaaaatcagaaaaagcaaatcgaagcaaagcacaccaaactgaaagaaaccagcaaaaaacaaaacatcatccgcgtgcagtaaaatctattgctggtgttcgtggaatcgatgaaggcgggacagagttctatgtcacattaagcgatagattgcaatggcggtcaaataggtaggcaaatgcccaagcctatataggcctcccaatactcaaagaaacaaaaccctatataggcctcccaaagcttgctcaataaccttagttttttttcagaatttttttaaaattaaattcaaaaacgttttcttaaaaataattgttaaaacaagtttaagaattgagaaatataaaaatcaccgcttattaaaaattttagttaatatattttaaaactgttcattgtgttgtaaaagtttgtcgtgtatttaaaaagtattcaccatttatgtaaaaaatgtttatgtttaaatgaataggaaagatgaaaacagagaaagaaatcaagaatgaacgaaacagaaaaaaaaaacagaaagagaaaaaaaaaacaagagaaccagtaaaaaacaaaacaaaacatagaaaaccgaccgtaaatgtttggcctactcaaacatgcacgtatgtgttgccagaaatttgacagttaaggtgtcaaatatggtttaacacttaccggcatgtttttagtcacatatcacagggaaggcgtaatggtaggcaannnnnnnnnnnnnnnnnnnnnngcggaaaggcaaatattttctaacacgaaggcgcttcctgtctgcagaaaagcactctgacctccatctgttggctgcttcctgaagaataacctatctagttgtgcagctagcagaggctagattggcacactggttcaaatttttagcagttcatttgcttgtgaatttgtcatagccatacgaattcagcatagagaaccagccaaatgaattcagtgtgcggaatttgttatattttgcttgaaatagcaacttaattggccttttttttatcaccaagttgtgatagcagaaactgcatataaatcatcagcgtgaatgatgtgatgccggcaatgttgatttctgaagtcaaacagccccattctccaaaccaaacatgcacttgtcataaagacacagaggactccctgccattatgtttgcaaattcttcagtttgcatcaacttactgatggatggaaaatacggatagtcggtctctgtgcatctgcgccccatttttgttgttctttcaacacataaaagcttattattgcctgtacagactacataatatttctcttttcctaatgaatagatgacgaaatttaagaaaatgttcaacttgaattcatgctgcagcatcaaagtggtcgctgtctccattgccagggtttctctgtattcattcatgcatccaaaagctccaaccagcaggatgaaggcctcccttccacctgacaatacaacaggttttaatatatccaaaattttcatttccatgcatgctatagctgctaaatttattaagcagataacgcatgctattatatgaaccattggctaaagcaattgccagtatagagtctcagttagcatactgctaatagttcgtatcagtgactattctttcgggattatgtaactaatatatagtaaacacgggagttaatcagttaaacaatctcactagcattagtgccatagcacaagaataaaccacgaagaagagagctctcatatgtctgcatgtagggaataacaggaattgaagcatagggtgctagcagtagtacctagttaatgatcccttcatctgctgttcttgtctgcgctgcttgtttcttgctttcattccctgagcgtgatgaagctacttcatcatcctgctctgcatccaccaggagtaaataaatatgaaaagttagtgaacacagcaacaagacgatcaaatttaggtgtaggagaagttatgttatttcacctcccaattcgaatgacctgctggtcaagaaatgttgtgacagcatatccctcgcactgacagcgttctcttttgctaactggcgcacttcctcagagtaactcccccacttggctctcggcgtgggatcatcctccatttctatgactatgttttgcaacgtgcagcaggcatagatcgtcttatatagagtgccttggacagcgaacgacatctctccctgcaagcacttccatgtgtctttgagcattgccagtgccttcagagcacaggttgtggctgaagagtgtcccctattaaactgcaccttggagtccgacagatctccttcctggaaaggtgtgagtagccatggcagaagaggatatcctgcatctccaattatgtattccccagcttctgatccatctaatgccaccttcagcttgctgccattcagccaactgcccttctcacacaccttgaagaattcagagtcctgcaaaaggcccaactgattcatgctacccgctggtcccaaccaaatgtttctgaacctcatctttggatcaacaattacttgcatccgagtgctctgtttcttctcacggtcacagtttgatccaaatgggatgtgagttgtacatataacaccgcaacagttgtgcatattgtggatcttgccaaacatggatttgatcttatccatttcgctggagtatggccagctcgagtggtgatctgcttgcttccacacagcatcagtgaacctcccagttaccaacaagactgttgactcgctcacaccaatagaggatcctatggtctctgttggctcactagattgcaaccttctcaaagcaacaactactcgatcttgtaaagacatcaccctcccatcaataagggtgtagctgttcatatcttccattgacggacccatcaccaagctgcagatgtagctaaaggtttttcttgtcattttgaagacaaactcaaatctttgtgtgtcctctaaaaaagttaaggttcctgcataagaaaaaaaacataaaagtggttacacaatccataagagcgagctcaaatgtgacaattaaaatagtgagatccagcaaaacaacatataagcaggggggtagggaacaagtgagaacaacataaacttagcaaatgagggactccggccaaatccgagagtaggattggttaggcattacaaaatgataaaaagctagtcatctgttttcttcagagcaaaaaaaactagtgatagatgctgacggaaggtagaaaacaaagagaatagttcaaataaccagaatataaacagggaagttaagatgaacgagcaatgctaaattacctgtggacatgaaagagaggctgacatttgtctccaagttgttggggttagctgtgtagaaggcataccatttccttggattatcaccttcacgtgcatatgccttgacatgctcaacatggctgaacttgtcccactcagggccagattgtcccgtggcaatggaagcgagcagtgctaggctgcagtatagctccaaatgccttgggcttatgcatcccatgtattctgggagcgtctccatgtctttatccgtgagtatgagcctctggagtgcaggaacaccttccaacgccttcaactttgggcagtcttcgatggtaagcttctgcagtcttggaagattagtgatcatctccaggccaaggatttcattcagtttcagctcgaccagagatgggaagctcgctagagagatgagaccgtggacatagtatatgtgtaaactattcaaaccgcttgcctgggaggcaaggccaggaggaagacacgtcagtttgcagtgctctaggagaagttcctgcaagacaggaaaggcttgcacttgcttctcccactcccactcctcccattccaccattcctattaaattcatgttttgcaatctcggaaacgcaggcacaatcttggaagaatgaggactgtgatggcaggactgcacgaattcaggtccaacacacttgatggctggagcacgctggatctgaatgaactccaaataggggagctgacacaagccatcaggaagctgtgtgcagcaagccaggtcatcaatcattagaatcctcaagttattgaggggcacaactgatgatgacatcatccaccttgggagccgtcggccaaaatacccattgatataaagatcttctaacgtgggcggagggttgagctcatcaaagacattctcgatccgtttttgctcttcctcttcaataagcctatcttctcgcaatctactaccacatgttaagtctagattggtaagatgcaccttctcaccaagctttgcctttgctgcagatgagaaagcagttaccttctccaacccttgtattccaacatgcttgagccgataaagagggcccaactcatccaaactacaccactcaccatccatctgggctggaaacccatctattatcctcagatttgccagatcacggaaccccttaggtatgccatttatacttgtgttgttgaagttaagataccttagctgccctaactttacaatgctatctggtagtttaacaaattgtttgcatcttgcaaggttaatatactgcaagaatttcatctttccaatgctatctggcagactagatatatcggtgttttctaaggacaagtacctcaaatgcttgagtttatgcacagattgaaccaatgcaacatctgcagattctatgcataaagttcgtagacatggaaaattacccaacgaatcactaggcttcatatttaagtgtccaactgatattagtgttctcaatgtcttttgtgcttgtaaagagctccagtccaacccatctgattccgatgctttgttttctacagatatctgaagaaactcatgtatactaagtttagtaacaacatcagtttccccactgtgagctactagtgcctcatctctagacacatattgagcaaatgagcgtacaacgtcatgcatgttgcaaacacgttgatcaacgtagtatgcatcaggctctataaggtttcttagtatcagctccttatagtacttgctacctagttcttctaagccatctgaggttccgtgaataaatccttcactgatccacaagccaattatgttgtctcttctgaacaatgcagtttttgggataagggagtagcatagaaaacattgcttgatgctagaaggtaaatcttcatagcttaagtatactgcatggtttagctcttcaggcattccagatactgaccatatagaatcatccagaaccatctcccagtcacggcgcttattgtccttttggcacaagagtcctcccattactttgacagtaagaggcaaaccatcacattttgctataatttgcaatccaatatccttgagcgtatcaatttcatgtccatttgtctcacttgagactatctgcaagcaggtttaactgacacagtcaatgcagaaaagtttgcctttttaggaaaaatagcagcttctggaggctttgtgccaattcaatattagtcaatnnnnnnnnnnnnnnnnnnnnnnnnnnnnnnnnnnccagttactacagtttgatagctcggttttttcaaagtattctaggaatactacagtttttacagttaccatggttataatattaatcaccgtcagttgtttggctaccactaaaaattgttcccccctcctcccacatcgcatcagccgagaggaacggagcgagcagatcctgctggtcgagcttgctacacactacataggcgtgcgactgttgctcctgttgctcgtgcgattttgtcctatggtggtcttcatgcgttcagtttgnnnnnnnnnnnnnnnnnnnnnnnnnnnnnnnnnnnnnnnnnnnnnnnnnnnnnnnnnnnnnnnnnnnnnnnnnnnnnnnnnnnnnnnnnnnnnnnnnnnnnntttgtgcatggctgttcggttttcagggtccatctagttaggaggtcacagtattcacnnnnnnnnnnnnnnnnnnnnnnnnnnnnnnnnnnnnnnnnnnnnnnnnnnnnnnnnnnnnnnnnnnnnnnnnnnnnnnnnnnnnnnnnnnnnnnnnnnnnnnnntatagttaagttactgaggtggtatagagagtttagttttacgaaaagggctagagatgctcttatatatcgtgacctgataagaacctatcaatctggtatgagtccagacttgatcaactgctaccaacccacagagtgcgggctatatccttcttctggtttgggcttgcgcctgctatagtgtatttcccacgtgaccgctcaaaaattgatacatgtgggaatatatgagcctgaggttaatagtgtgtggtggcaaaattatagtgcccatgtgttatatcttgtatctatccatctagtaacctcaaaaataaagatggcgtcaggccactcccgggctccaaagaaaggtggacatgttcttagcatcgtaatgtaggaaatctcaaatgtggcaccctagttatcacaaatctctaggcaaaatctgaggtggcaccatatatatagtgcagatcctgacagtgtaaaacgctcaaaaaaccatgcatcgagaaggttgtatataaacacccatcatgaaataagagacatcccaccgtgagtgccttattatcttgctacaaattaagcatggagctagtagttattaaagatgcatgtaatttcgttacgcacctgtttcttgagcaatgaccatgcatcctcctcatctaatttgttgacatggtggtagggaagctcagctttcatccctcgggctactttttcatctctagtagtgatgaggactcggctacctcgagccacaacattacccaagggcgttttaagcacatcaccccatgctccatggttccatacatcatctagtaccaggaatagcttctttcctttcaaggcagtggtgaggatcgactgaagcacaaccaatgccttttcacctccatgtacacccccggcgagcgtgatgattgtccttagtaactcaaccttgtcaaagtccttgttgatgcttaaccatattgtgttgtcgaactcggccatcatggtttcatcattgatgacgttctgagcaagagtagtcttgccaatcccaccgacaccaacaatggccacgaccatgatgttggtgtttccgtctttttcagttaacatggtctcaaccagcgctcttgtgtcttctttgatcttctccccaactacacctgaccggtcaaattcccctgtcgtctcacggttggcattagcagaacgagtgacgtgcactttgctgctacgatcctcatatgaaccgatattgatgaagctgaaagcagtgcttcgctccttgatggtgtcgagcctcttgttgagtgccttgatgcgggtgccgatgtcatgggcatgggagggattctgcatgcaaaagagcaaggggttgaagcaccccacatctaaagtggacgaacggcgctccatggccttgagctggcagaggtcgagtatatcagcagcttcgtacatggcacgcttgagctggcccacccactcttgcacgctcttgtcggtgatgtttctcctgtcagcgtccgcgaggaagttcttgaggtccctaagcttaatgtccatcttgtcaatctcccgtctaaatccaagcagcatgtgcacctcttccctcgccatctccgctagcatgtttagcacgtaggatgcaaaagcatccaggaccatcgccatgtttgctacgtttctgctgtaacaaattttaaccacatatcatatcttccatgccactcgttgcagctgaagattgccagccaaaattattgaaaaaaaggcagctctagaatgctaacatgggcagatgaggaacaagttatagttcgtaagcacgggtaagctacctatatggacagatgcaagcaaaaccaggtaaaagtaaagagagagatgcaaaattaccttcaaggcggatggatgttgggtcctgctctagctcctctgtagcaactcgtcgtacaccagtactggtgaagggctaacaaggactgaggcacctgtgtgtatataagccaaaggggaaataattagttctctaaccgtgtcatgttactagattacatacaacttgtatgggattaaacataactcgcacattgtgatcgacggaaacatccgcacgcgttgagccttggattattcagcagaccgacctgttagctggcagctaagctagctgatgaatggtacgatacaattgatgccaattcagcagaccgacctgttagctggcagctaagctaactgatgaatggtacgatacaattgatgccgcgtctgacgttaagaaacaccaacacaattagctgtacctagatatacccgtctcttattaaaggttgtgcagggaaggaaaggcataaaccaggacccaggagcatcctggtattttccggaagcaagtgccgtacaactgaaaaattggctgtttgtttggaggctagccagaaccaaaagactctttgtgattcgatatcatggtttcacaccagcccaacttgctgcacaatgtagtattctgtacattatactataataaaggccttctgattggttaactagcactaaatgtcgccattttctacggatattttgaggcctcgcagtttcctaagacttcttacgaggttgagcgagggccggccctggagggggggcaggggggcggccgccccgggcccccaggtccagggggcccccacgtcgcacatagcccatgccccatgggcctgtgaaactaggacactaaacactcctattagactcgatcgatagtcagttagtcacaagggcctagcagccagatgcagcaagtcgacgatgatggcgacaaatttgctgtaattgccagtttccatacgaggcagagccgtaacgatcccgatccgatccaggctccaggccgcgagacgagttgctggctcaggacgaggcgccactagggttcagtagtccaacgaactccgctccgctctctggtttctactaggcgctggacaagcacgcccgttgccgatcgccttcggccgaagctagatgcaaattcacatcgtgttatcattgagatgagaactgaccgatccaaggtactcctatattatatctttaaatttatcacttcctatgttctatccgcatacatgcatatatatagcttggattaatcaagttttgaggccatctttttagggttttgtgttatcatgacgattaaaaagtatacgtggagattccagcagtgacacactatttgttaaaaaaaatctccctcttaatatatagattgctcagctgccattccctaaaaaagtgtattgaaaagaagttttaccataaattagaccagccaaatgtgggttctatgtaataaaaaacaaaccgttgtattcatgttgagaagaagtttttgatgataaaaattttcagtgataaaagttcattgcaatgtaaggagtatatttgaaagggccctgagataaaaaatttcagtgctaaaaattcactgcaatggagggagtatatgnnnnnnnnnnnnnnnnnnnnnnnnnnnnnnnnnnnnnnnnnnnnnnnnnnnnnnnnnngttgagcatcggccggcataaccaacgttaggttccaacgtcccctgccttgtgggatatactactggcacccgacatatatgaactgcgtagtgaatggggcaatattatcagtactatattgaaataaaagactgaagatccttgggtcagtttctgggagatcatcatcaggcactgtcatccttgtccttggtgtaatcaaaatgaattttgcgtggctatgctatgcttttgctggacctaataatggtttgatgttgcttaagtaattcagagatgtctactgacaatgaacttggggtacttgtaaatgtactacattatgatgctggaagtctggatctgaattagaccggcgctctcatcaagcacagcaaatacagaatgtaccaacaaaaatgtgcagattccaaaattacttagcaaaattagggatcaaagagtgaatggaacaaacggaaagggaatggggtgcggatgtggtgggtccaggacgtacactgaccgtggcggcgccggtggacggtggagaagacggccgcgctgcccctgcccccttttcgtcggggcagcgccaccggcgcccaccacctcacttccccatcccgctgcacagcagcggcgctggtggcgaatcctcctatcgcggcggcatgacggcggctgcgcacaaccgtccatcgaaccagaaagtcgctgcgacggcgccgccggcgacctttccctcgccgtcgggcccagccacagccgcggcggccccaagaccgcaaccctccttttttttttggagaagggccctgcccagcccgacaacctgctcgaggcccgaacacgctcttctttttttagaaaaatgagccagacacacatataccggcccatgtaatttttcggtttttcgttttccttccattattttttccgggtgtattttgtaaaacatgaacatcttttagaatttgcaagaattttttttaattcgtgaacctttttaaaggccaccaatttttattccaagatctgtgaacattttgtcaaattccgcaaactttcatgaaatccagcaaactttttcaaagtaattcgcaaactttttttaattatgtgaccattttttaaaattcgcaaaaataaataaattcattaacattttaaaatcaatgaacatttaaacaaattaaatatgtaaaaatattataaatcttgtcagcatttaatgatttcaccaagtttttaaaaatttatttttttgtggcaatttctttttccaagacaccaaaccagttgtagcaaaagacgagggggaaaaaaaccaacaagcggttgacaagagagtgattacttttttttttttgagaaacaacgcgctttatttcatgttcaagtttacaggaatacaaagatgatatggtggatcaatgagccacacatggccgctagagtctaaggtagtcaccattcaaccgcaaaaaaaaggtagtcaccattctagctaatctatgtgcctaccgttgcttcctgccgttgatctcctgcaagatcatgcaataatcgccgagatgcaccgagctctttaggtcgtttatgactcttagacagtcagatgcaatgcgcactttgttcatgaccgaatcctcagctaatgcgagagcctccctgcaagcatatgcttccaaagtctttggttcagtcatcccttggaaaaccacagcagaagcacccaaaaaacagcctggcctcgccgcggcacacaacgcccacaacacccgtgtcggaggacttggccactgccccatatacattcatcttgacctctccctctgccgggttcgcttccttgacgtccggatttgaaactaattcagagtggtgcaaacaaacttccctgttgaggaattgcgttgcagcgatttgcaggaggcccatgcctcgggcccctacaggctagggtgagctgcattgtaccaccactgaattgtacattttgcatgccaatcaggtcaatcagatggcagtgttgtacgctctacagtataatgtctgcagtattgtcttcaggtgtatttggttttgaattttccacgataccactttgcagtattgcactgtctgcaatagtgtttgcataacaacacttgcctttgccaacaaggtagatgaccaaactttacaaaaattgcctgatttcaattcatgctgcagcaccaaagttgtctctggctccattaccagggctgctctggactcatgcattcaaaaactccaaccaacgggatgccggcttatctttcacctgatcaaaccaaaggttttgattattatccgataaacggccatgcaccagggtcgagcatcaagatggcaacagggatggaatccaccgggttttgcttgcccaaaccctcctcatgaaaaaattgcaaacctgtctccgtctccatcatcgtgcgcggggctagttttttgcctgttccctaaacctgtcgggttttctaaacccacgagaaacccgtctccacaagcagacaagaaaaacaaaaaacatttgaaagaaaaacagaaggatattacatcagcaaaaatcatcatatttaagcaacaaacatagtatatttcagcagcaacaacataagataaataatagccgggggcctcaacactagggggctcgggcgctcaggcgttgtggctttggaccgcttgagtcaacatggatcagtgtcatgtaaaatataatgtatgttgatgggtattgtcgggtttcggattcgcatactactgaaacgggtttaaacccgtgaaacatgccggcttttataatatacccacctagaaagacgcacatcccgtcccctaatagggtaaaaaagacctcttacggtacatcaggtctgtgggaaccgttcattttttatgatttgagggtccatattagccagtactacaatagattttcagtagtatattgaccaatctggggcattttaggtagttcgctatgttcatcaatctcgttaggcaggttcacgcatgcaggtttctgcccgccattnnnnnnnnnnnnnnnnnnnnnnnnnnnnnnnnnnnnnnnnnnnnnnnnnnnnnnnnnnnnnnnnnnnnnnnnnnnnnnnnnnnnnnnnnnnnnnnnnnnnnnnnnnnnnnnnnnnnnnnnnnnnnnnnnnnnnnnnnnnnnnnnnnnnnnnnnnnnnnnnnnnnnnnnnnnnnnnnnnnnnnnnnnnnnnnnnnnnnnnnnnnnnnnnnnnnnnnnnnnnnnnnnnnnnnnnnnnnnnnnnnnnnnnnnnnnnnnnnnnnnnnnnnnnnnnnnnnnnnnnnnnnnnnnnnnnnnnnnnnnnnnnnnnnnnnnnnnnnnnnnnnnnnnnnnnnnnnnnnnnnnnnnnnnnnnnnnnnnnnnnnnnnnnnnnnnnnnnnnnnnnnnnnnnnnnnnnnnnnnnnnnnnnnnnnnnnnnnnnnnnnnnnnnnnnnnnnnnnnnnnnnnnnnnnnnnnnnnnnnnnnnnnnnnnnnnnnnnagtccgtcctcgcacatcggacgccgaatctgcactgcgccacgccgtcgagatccgtcaccatcaatgtgtaggatgaagcaccgctccatcaaagatgcggtccactggtccctcgagcccgtgcacatnnnnnnnnnnnnnnnnnnnnnnnnnnnnnnnnnnnnnnnnnnnnnnnnnnnnnnnnnnnnnnnnnnnnnnnnnnnnnnnnnnnnnnnnnnnnnnnnnnnnnnnnnnnnnnnnnnnnnnnnnnnnnnnnnnnnnnnnnnnnnnnnnnnnnnnnnnnnnnnnnnnnnnnnnnnnnnnnnnnnnncggatctgaacagaggacctccatcgagcaacttgtacacgaaccgccgccatcgctgccggggactggatggagaatccaggccgccgccacctgaccggccatggcaccaccatggtgcctaggccggtgtcgccaagcccaccatgcccgcctgtagacgctcaccagatccgccggcccgccaaagcccatctgggtacggcgagatccgcgatctgggccgccgccacaggggctcctctgccgcggtatcgcgcctgcgctggcgccgctgtcacactcgctgacgggaacccgctgctccacgctgccggtgccccgcagttctgtgtgccgtcgccgccaagggaagacgcagccaccacacgaggggaagagccccgccgccgccatcacttgaacgagggaggaggcctttgggccggcggtggcagatcgcccccgtgtcgcctaggtttctgcccgccttggccaagccttcctcccattgtccaagtgccatcctgtaacgagttgctatggccaagcttggcatgcgacctctcattgtcgggcacggcgagctcccatgatggcctcctcgggaggtggcctgaggtgaaccgaagccgaagtcgacgtcgagcatgttgccggccggacacctcgggctcttgctgaaggccgcacgcatggcgtcgatctccagctgcatccgccttggccgtccactcctctgctgccgtctacgttcatcagctggatgaggcccaacgcctccatacaaaagggatcctcctcgttgccgtcgtccatgcccggccggccaagaagggtctgcatgcatgtcaacggagaactccatgggcttggggggctgaagcttacgttgttgcccggacagaactgaatgttggcgcaggcgcgactcatcgcgacaatttcaacccatttacgaagcgagcacaagcaggttgattgataaacatatatgtatgtatcggttccgccggccggagatgcaagcaaaacgcaggcggcgtcgagaacacacgctgatccgatctcatggagaacatacgcaggcgacgccggatgcgatgggattaatttagttaatttgattacccctggtagggaattaccaatataacctagagcaaaactttgactgattcatactaaccgttggatcaactaaatactacccactattttggatagtatgatgcaccgtaaaaattctcgagtaaaaacccacggagacgtgggtttcggggcccattgccatcttaagtcgagcacaccgaaatttaattttcatttccacagaagtatagctgctctttattgttcatcacgcatcttgtattaaatgaaccaccaattaagtaaagcacttgccagcacagagaggaaatacacaagggactcatgtaaaagatatactgtactaatgatttttaccttgaattggcacctcttttccctctagacccggttttttttctcccacatttccacatcaaaagaacaaaccaaggagaggactctgatattgtttcatggattttgcgtatgcagaaccaggagatatacaggcacaaggcttgtacaggcaatcaggcttgaagcaagaaactagaagatgcatgcgtatagaaaacatcagcgccacacgctccttcatccaccacggccgcaaactccatcgatacacgcccgtgcctgcggagaggcctctcgcgggatccggctacgccgccttcaacgacacgcgccggtttcggcatctccatgcgacgcgactctgctacggtacgcgcgcaagcctgggattcccgagtcagctgggagcgggtcatctacaccaaccgcctgcacggatatacatcaagcgctccattgcagaaccgagcgactgcagcaatctcaacatgcactgtccacacgccaggccgatgtggaacaagatgcaatcttcctcgacttctccggcacgacacggcatcgatacttcgtcgtcgcgagggacgccatcaagcgacgcatcatcgtcaacacgccgctgcgacgccannnnnnnnnnnnnnnnnnnnnnnnnnnnnnnnnnnnnnnnnnnnnnnnnnnnnnnnnnnnnnnnnnnnnnnnnnnnnnnnnnnnnnnnnnnnnnnnnnnnnnnnnnnnnnnnnnnnnnnnnnnnnnnnnnnnnnnnnnnnnnnnnnnnnnnnnnnnnnnnnnnnnnnnnnnnnnnnnnnnnnnnnnnnnnnnnnnnnnnnnnnnnnnnnnnnnnnnnnnnnnnnnnnnnnnnnnnnnnnnnnnnnnnnnnnnnnnnnnnnnnnnnnnnnnnnnnnnnnnnnnnnnnnnnnnnnnnnnnnnnnnnnnnnnnnnnnnnnnnnnnnnnnnnnnnnnnnnnnnnnnnnnnnnnnnnnnnnnnnnnnnnnnnnnnnnnnnnnnnnnnnnnnnnnnnnnnnnnnnnnnnnnnnnnnnnnnnnnnnnnnnnnnnnnnnnnnnnnnnnnnnnnnnnnnnnnnnnnnnnnnnnnnnnnnnnnnnnnnnnnnnnnnnnnnnnnnnnnnnnnnnnnnnnnnnnnnnnnnnnnnnnnnnnnnnnnnnnnnnnnnnnnnnnnnnnnnnnnnnnnnnnnnnnnnnnnnnnnnnnnnnnnnnnnnnnnnnnnnnnnnnnnnnnnnnnnnnnnnnnnnnnnnnnnnnnnnnnnnnnnnnnnnnnnnnnnnnnnnnnnnnnnnnnnnnnnnnnnnnnnnnnnnnnnnnnnnnnnnnnnnnnnnnnnnnnnnnnnnnnnnnnnnnnnnnnnnnnnnnnnnnnnnnnnnnnnnnnnnnnnnnnnnnnnnnnnnnnnnnnnnnnnnnnnnnnnnnnnnnnnnnnnnnnnnnnnnnnnnnnnnnnnnnnnnnnnnnnnnnnnnnnnnnnnnnnnnnnnnnnnnnnnnnnnnnnnnnnnnnnnnnnnnnnnnnnnnnnnnnnnnnnnnnnnnnnnngcttgcagtagtgacgaatgcaaagcttcaattgccagggctgctctgaattcatgcatttaaaagccccaaccagcaggatgtagtcctccctccacctgataaatcatgattttagttgttaacccagtgatggagtttacctttgtcgtggttgacctttcgatgtgccattgggcatggtttgnnnnnnnnnnnnnnnnnnnnnnnnnnnnnnnnnnnnnnnnnnnnnnnnnnnnnnnnnnnnnnnnnnnnnnnnnnnnnnnnnnnnnnnnnnnnnnnnnnnnnnnnnnnnnnnnnnnnnnnnnnnnnnnnnnnnnnnnnnnnnnnnnnnnnnnnnnnnnnnnnnnnnnnnnnnnnnnnnnnnnnnnnnnnnnnnnnnnnnnnnnnnnnnnnnnnnnnnnnnnnnnnnnnnnnnnnnnnnnnnnnnnnnnnnnnnnnnnnnnnnnnnnnnnnnnnnnnnnnnnnnnnnnnnnnnnnnnnnnnnnnnnnnnnnnnnnnnnnnnnnnnnnnnnnnnnnnnnnnnnnnnnnnnnnnnnnnnnnnnnnnnnnnnnnnnnnnnnnnnnnnnnnnnnnnnnnnnnnnnnnnnnnnnnnnnnnnnnnnnnnnnnnnnnnnnnnnnnnnnnnnnnnnnnnnnnnnnnnnnnnnnnnnnnnnnnnnnnnnnnnnnnnnnnnnnnnnnnnnnnnnnnnnnnnnnnnnnnnnnnnnnnnnnnnnnnnnnnnnnnnnnnnnnnnnnnnnnnnnnnnnnnnnnnnnnnnnnnnnnnnnnnnnnnnnnnnnnnnnnnnnnnnnnnnnnnnnnnnnnnnnnnnnnnnnnnnnnnnnnnnnnnnnnnnnnnnnnnnnnnnnnnnnnnnnnnnnnnnnnnnnnnnnnnnnnnnnnnnnnnnnnnnnnnnnnnnnnnnnnnnnnnnnnnnnnnnnnnnnnnnnnnnnnnnnnnnnnnnnnnnnnnnnnnnnnnnnnnnnnnnnnnnnnnnnnnnnnnnnnnnnnnnnnnnnnnnnnnnnnnnnnnnnnnnnnnnnnnnnnnnnnnnnnnnnnnnnnnnnnnnnnnnnnnnnnnnnnnnnnnnnnnnnnnnnnnnnnnnnnnnnnnnnnnnnnnnnnnnnnnnnnnnnnnnnnnnnnnnnnnnnnnnnnnnnnnnnnnnnnnnnnnnnnnnnnnnnnnnnnnnnnnnnnnnnnnnnnnnnnnnnnnnnnnnnnnnnnnnnnnnnnnnnnnnnnnnnnnnnnnnnnnnnnnnnnnnnnnnnnnnnnnnnnnnnnnnnnnnnnnnnnnnnnnnnnnnnnnnnnnnnnnnnnnnnnnnnnnnnnnnnnnnnnnnnnnnnnnnnnnnnnnnnnnnnnnnnnnnnnnnnnnnnnnnnnnnnnnnnnnnnnnnnnnnnnnnnnnnnnnnnnnnnnnnnnnnnnnnnnnnnnnnnnnnnnnnnnnnnnnnnnnnnnnnnnnnnnnnnnnnnnnnnnnnnnnnnnnnnnnnnnnnnnnnnnnnnnnnnnnnnnnnnnnnnnnnnnnnnnnnnnnnnnnnnnnnnnnnnnnnnnnnnnnnnnnnnnnnnnnnnnnnnnnnnnnnnnnnnnnnnnnnnnnnnnnnnnnnnnnnnnnnnnnnnnnnnnnnnnnnnnnnnnnnnnnnnnnnnnnnnnnnnnnnnnnnnnnnnnnnnnnnnnnnnnnnnnnnnnnnnnnnnnnnnnnnnnnnnnnnnnnnnnnnnnnnnnnnnnnnnnnnnnnnnnnnnnnnnnnnnnnnnnnnnnnnnnnnnnnnnnnnnnnnnnnnnnnnnnnnnnnnnnnnnnnnnnnnnnnnnnnnnnnnnnnnnnnnnnnnnnnnnnnnnnnnnnnnnnnnnnnnnnnnnnnnnnnnnnnnnnnnnnnnnnnnnnnnnnnnnnnnnnnnnnnnnnnnnnnnnnnnnnnnnnnnnnnnnnnnnnnnnnnnnnnnnnnnnnnnnnnnnnnnnnnnnnnnnnnnnnnnnnnnnnnnnnnnnnnnnnnnnnnnnnnnnnnnnnnnnnnnnnnnnnnnnnnnnnnnnnnnnnnnnnnnnnnnnnnnnnnnnnnnnnnnnnnnnnnnnnnnnnnnnnnnnnnnnnnnnnnnnnnnnnnnnnnnnnnnnnnnnnnnnnnnnnnnnnnnnnnnnnnnnnnnnnnnnnnnnnnnnnnnnnnnnnnnnnnnnnnnnnnnnnnnnnnnnnnnnnnnnnnnnnnnnnnnnnnnnnnnnnnnnnnnnnnnnnnnnnnnnnnnnnnnnnnnnnnnnnnnnnnnnnnnnnnnnnnnnnnnnnnnnnnnnnnnnnnnnnnnnnnnnnnnnnnnnnnnnnnnnnnnnnnnnnnnnnnnnnnnnnnnnnnnnnnnnnnnnnnnnnnnnnnnnnnnnnnnnnnnnnnnnnnnnnnnnnnnnnnnnnnnnnnnnnnnnnnnnnnnnnnnnnnnnnnnnnnnnnnnnnnnnnnnnnnnnnnnnnnnnnnnnnnnnnnnnnnnnnnnnnnnnnnnnnnnnnnnnnnnnnnnnnnnnnnnnnnnnnnnnnnnnnnnnnnnnnnnnnnnnnnnnnnnnnnnnnnnnnnnnnnnnnnnnnnnnnnnnnnnnnnnnnnnnnnnnnnnnnnnnnnnnnnnnnnnnnnnnnnnnnnnnnnnnnnnnnnnnnnnnnnnnnnnnnnnnnnnnnnnnnnnnnnnnnnnnnnnnnnnnnnnnnnnnnnnnnn

SEQ ID NO: 4 - DNA, 64196 bp, Artificial Sequence
  Scaffold 1540406
  misc_feature (2)..(737): n is a, c, g, or t
  misc_feature (827)..(1238): n is a, c, g, or t
  misc_feature (1249)..(2319): n is a, c, g, or t
  misc_feature (2400)..(2435): n is a, c, g, or t
  misc_feature (2824)..(2947): n is a, c, g, or t
  misc_feature (3406)..(3490): n is a, c, g, or t
  misc_feature (4069)..(4156): n is a, c, g, or t
  misc_feature (4175)..(4238): n is a, c, g, or t
  misc_feature (7164)..(7392): n is a, c, g, or t
  misc_feature (8013)..(8562): n is a, c, g, or t
  misc_feature (9343)..(9525): n is a, c, g, or t
  misc_feature (9532)..(10061): n is a, c, g, or t
  misc_feature (10110)..(10238): n is a, c, g, or t
  misc_feature (12335)..(12506): n is a, c, g, or t
  misc_feature (12650)..(12786): n is a, c, g, or t
  misc_feature (13386)..(13497): n is a, c, g, or t
  misc_feature (14331)..(14456): n is a, c, g, or t
  misc_feature (16954)..(16993): n is a, c, g, or t
  misc_feature (18527)..(18844): n is a, c, g, or t
  misc_feature (19629)..(19691): n is a, c, g, or t
  misc_feature (20673)..(20713): n is a, c, g, or t
  misc_feature (21775)..(21819): n is a, c, g, or t
  misc_feature (23801)..(23833): n is a, c, g, or t
  misc_feature (26245)..(26290): n is a, c, g, or t
  misc_feature (26592)..(26836): n is a, c, g, or t
  misc_feature (29510)..(29541): n is a, c, g, or t
  misc_feature (29696)..(29842): n is a, c, g, or t
  misc_feature (30052)..(30213): n is a, c, g, or t
  misc_feature (30430)..(32351): n is a, c, g, or t
  misc_feature (34538)..(34556): n is a, c, g, or t
  misc_feature (35060)..(35344): n is a, c, g, or t
  misc_feature (35699)..(35877): n is a, c, g, or t
  misc_feature (36553)..(36571): n is a, c, g, or t
  misc_feature (37428)..(37583): n is a, c, g, or t
  misc_feature (37777)..(37819): n is a, c, g, or t
  misc_feature (39949)..(40033): n is a, c, g, or t
  misc_feature (43400)..(43676): n is a, c, g, or t
  misc_feature (43878)..(43928): n is a, c, g, or t
  misc_feature (44014)..(44471): n is a, c, g, or t
  misc_feature (44752)..(44781): n is a, c, g, or t
  misc_feature (44803)..(46074): n is a, c, g, or t
  misc_feature (48085)..(48123): n is a, c, g, or t
  misc_feature (48290)..(48342): n is a, c, g, or t
  misc_feature (50460)..(50485): n is a, c, g, or t
  misc_feature (52591)..(54251): n is a, c, g, or t
  misc_feature (54351)..(54446): n is a, c, g, or t
  misc_feature (54913)..(55422): n is a, c, g, or t
  misc_feature (55926)..(55991): n is a, c, g, or t
  misc_feature (56177)..(56225): n is a, c, g, or t
  misc_feature (58360)..(58558): n is a, c, g, or t
  misc_feature (58747)..(58848): n is a, c, g, or t
  misc_feature (59140)..(59183): n is a, c, g, or t
  misc_feature (59216)..(59236): n is a, c, g, or t
  misc_feature (61629)..(61730): n is a, c, g, or t
  misc_feature (62782)..(62893): n is a, c, g, or t
  misc_feature (63769)..(63885): n is a, c, g, or t
  misc_feature (63888)..(64196): n is a, c, g, or t
cnnnnnnnnnnnnnnnnnnnnnnnnnnnnnnnnnnnnnnnnnnnnnnnnnnnnnnnnnnnnnnnnnnnnnnnnnnnnnnnnnnnnnnnnnnnnnnnnnnnnnnnnnnnnnnnnnnnnnnnnnnnnnnnnnnnnnnnnnnnnnnnnnnnnnnnnnnnnnnnnnnnnnnnnnnnnnnnnnnnnnnnnnnnnnnnnnnnnnnnnnnnnnnnnnnnnnnnnnnnnnnnnnnnnnnnnnnnnnnnnnnnnnnnnnnnnnnnnnnnnnnnnnnnnnnnnnnnnnnnnnnnnnnnnnnnnnnnnnnnnnnnnnnnnnnnnnnnnnnnnnnnnnnnnnnnnnnnnnnnnnnnnnnnnnnnnnnnnnnnnnnnnnnnnnnnnnnnnnnnnnnnnnnnnnnnnnnnnnnnnnnnnnnnnnnnnnnnnnnnnnnnnnnnnnnnnnnnnnnnnnnnnnnnnnnnnnnnnnnnnnnnnnnnnnnnnnnnnnnnnnnnnnnnnnnnnnnnnnnnnnnnnnnnnnnnnnnnnnnnnnnnnnnnnnnnnnnnnnnnnnnnnnnnnnnnnnnnnnnnnnnnnnnnnnnnnnnnnnnnnnnnnnnnnnnnnnnnnnnnnnnnnnnnnnnnnnnnnnnnnnnnnnnnnnnnnnnnnnnnnnnnnnnnnnnnnnnnnnnnnnnnnnnnnnnnnnnnnnnnnnnnnnnnnnnnnnnnnnnnnnnnnnnnnnnnnnnnnnnnnnnnnnnnnnnnnnnnntttcaataatactagaggtttataaaagctttttagttgattccttcggtaccagttctaaggctgttacaaaggcattttatttggtannnnnnnnnnnnnnnnnnnnnnnnnnnnnnnnnnnnnnnnnnnnnnnnnnnnnnnnnnnnnnnnnnnnnnnnnnnnnnnnnnnnnnnnnnnnnnnnnnnnnnnnnnnnnnnnnnnnnnnnnnnnnnnnnnnnnnnnnnnnnnnnnnnnnnnnnnnnnnnnnnnnnnnnnnnnnnnnnnnnnnnnnnnnnnnnnnnnnnnnnnnnnnnnnnnnnnnnnnnnnnnnnnnnnnnnnnnnnnnnnnnnnnnnnnnnnnnnnnnnnnnnnnnnnnnnnnnnnnnnnnnnnnnnnnnnnnnnnnnnnnnnnnnnnnnnnnnnnnnnnnnnnnnnnnnnnnnnnnnnnnnnnnnnnnnnnnnnnnnnnnnnnnnnnnnnnnnnnnnnnnnnnnnnnnnnnnnnnnnnnnnnnnnnnnnnaatatttgtgnnnnnnnnnnnnnnnnnnnnnnnnnnnnnnnnnnnnnnnnnnnnnnnnnnnnnnnnnnnnnnnnnnnnnnnnnnnnnnnnnnnnnnnnnnnnnnnnnnnnnnnnnnnnnnnnnnnnnnnnnnnnnnnnnnnnnnnnnnnnnnnnnnnnnnnnnnnnnnnnnnnnnnnnnnnnnnnnnnnnnnnnnnnnnnnnnnnnnnnnnnnnnnnnnnnnnnnnnnnnnnnnnnnnnnnnnnnnnnnnnnnnnnnnnnnnnnnnnnnnnnnnnnnnnnnnnnnnnnnnnnnnnnnnnnnnnnnnnnnnnnnnnnnnnnnnnnnnnnnnnnnnnnnnnnnnnnnnnnnnnnnnnnnnnnnnnnnnnnnnnnnnnnnnnnnnnnnnnnnnnnnnnnnnnnnnnnnnnnnnnnnnnnnnnnnnnnnnnnnnnnnnnnnnnnnnnnnnnnnnnnnnnnnnnnnnnnnnnnnnnnnnnnnnnnnnnnnnnnnnnnnnnnnnnnnnnnnnnnnnnnnnnnnnnnnnnnnnnnnnnnnnnnnnnnnnnnnnnnnnnnnnnnnnnnnnnnnnnnnnnnnnnnnnnnnnnnnnnnnnnnnnnnnnnnnnnnnnnnnnnnnnnnnnnnnnnnnnnnnnnnnnnnnnnnnnnnnnnnnnnnnnnnnnnnnnnnnnnnnnnnnnnnnnnnnnnnnnnnnnnnnnnnnnnnnnnnnnnnnnnnnnnnnnnnnnnnnnnnnnnnnnnnnnnnnnnnnnnnnnnnnnnnnnnnnnnnnnnnnnnnnnnnnnnnnnnnnnnnnnnnnnnnnnnnnnnnnnnnnnnnnnnnnnnnnnnnnnnnnnnnnnnnnnnnnnnnnnnnnnnnnnnnnnnnnnnnnnnnnnnnnnnnnnnnnnnnnnnnnnnnnnnnnnnnnnnnnnnnnnnnnnnnnnnnnnnnnnnnnnnnnnnnnnnnnnnnnnnnnnnnnnnnnnnnnnnnnnnnnnnnnnnnnnnnnnnnnnnnnnnnnnnnnnnnnnnnnnnnnnnnnnnnnnnnnnnnnnnnnnnnnnnnnnnnnnnnnnnnnnnnnnnnnnnnnnnnnnnnnnnnnnnnnnnnnaatcttgtttgtagtactggtgtcgtctttggtggtggttagagtgctaccgttatgagtgtcaacaccgtgccggggtcnnnnnnnnnnnnnnnnnnnnnnnnnnnnnnnnnnnnggctgtgtgcatcccttatatctttggacatcttgttggtgaagaggctggatgtaattgatatcatcgtgattttaatatatttcttttatcaaaaaataacatagcaacttatggccatggtgaaagtaatcttaaacagataaatcatgttgaaacaatgaaaaaaccaacaaaaagccgaaatgcagtaccttgtctacacccttatagcgtgagcctcagagaaatttatacaaaaccacgacggcccaggtggttagtgcgcgaggtttatgaccttaatttatttattttcttgacttctctcttatactcaccgccaggtgggacccatggaggtagggagccagttgatcggtcaactgaacaaaatacaatgctctatnnnnnnnnnnnnnnnnnnnnnnnnnnnnnnnnnnnnnnnnnnnnnnnnnnnnnnnnnnnnnnnnnnnnnnnnnnnnnnnnnnnnnnnnnnnnnnnnnnnnnnnnnnnnnnnnnnnnnnnnnnnntatttcattacctccgaattacactggatcttgaagttttttaatagttcatcctacagtgaaaaaaagaacttgtgaattccttgcaatcattagaaggttagtacaaacaaataaaaatagcatatttaacaagattataaattaaagctacaaaaattatagatacatctaggacgtatggatgttcatacatcaacttagataagaaatggatgtgtctttgatgacgggccgatgtgattctcggatgagactagaactcggtgatatttgttcgtcaaagtagaattcactgaatagttgcacacatagtttctatgttaatgaagtgtgagtcttggttaagttgtaatgtgttccacctatgtccaaatgttcatttttgtagaccgctcgtccatgcgggataggtgttgtacctacatttgtgagtatgaggcttctattgccggtagnnnnnnnnnnnnnnnnnnnnnnnnnnnnnnnnnnnnnnnnnnnnnnnnnnnnnnnnnnnnnnnnnnnnnnnnnnnnnnnnnnnnnatagccaaacttgtacttcatgacttctactttcgttgctttctttggttcaagccattcatgctcgtatgtataaaaacgtgaagaggcggaaaggagactcgtgtttctggcgagaagaggcggaaagcagagcgccaaccgcacctcctctgttttgtaggaagtactagccaaccaccccccacctccagtcggagtcggacgattaatgccggtcggatctctccgatttccgaacaggagaaatatcctgccgaattggcatgcatgcacgcgcaaagtgctgcggtttagccgtgcaagaacaacggacgcgtgatgaacgtaccgattatgcattacatgcatgcgttgacggtcgacaaaccataaaatagctatggaaaagaattatgtcaagtcacaacgaaagttctctgctgctcgtgagcacatacacgcctgtcatgaacagtaaatttcgaaaaaaggtgaattttttcaaatttttttgtgtggcaaactttgatgaatgttttgagtgttataatttgcaaagtttcttcatgatatggcacgctcattattttgcttttnnnnnnnnnnnnnnnnnnnnnnnnnnnnnnnnnnnnnnnnnnnnnnnnnnnnnnnnnnnnnnnnnnnnnnnnnnnnnnnnnnnnnnnnttttattctatcgtgaaannnnnnnnnnnnnnnnnnnnnnnnnnnnnnnnnnnnnnnnnnnnnnnnnnnnnnnnnnnnnnnncgctgtctgtcagcgttagcttaaccggttggcctgcttacgccaaccgacgaaacaatgtgtctccaaaatctctgggttcgtgtggcaccggccaacacaacaaagcttctctccaaactgagaccgggggtgtacagaaacacacctcagtttacttaatatatatactgaagtggtactgttgaacatgggcaaattttagaacatactgcaaggttagctgagcaacaatgcgctctcgacaagtcttgcagaaagatacgtagcaacatctccagattggcatgcgtctgtgattgaagctttgggaactgcacaactaatctcttccccagtccaacgcgacttgttccaaatcacgcaagctcctccgatttgtgttgaagtcgtattccgaatgcctcccaatcatatgattctgttactgaatctcaccgggtgtggatttattctaactgattccgctcatcctccatgcacatcacctcaactgcatgctgccatgtgatttgactatagagtggccccattgtctaggccagggaatccctctcgtaggtagtaggtacaacttggtcatgcactattaataaaaggttaagggatgatttcaaccgtgtttaattaaatgggacgcactgcggttaattattcttaaaaaacagtgtgaaataaatttttgttaattaactacttgatagttccaaagaaaacatatagatgtactgaagtttatggcaaaatacaatgaactttactgttatagtcggtgagctttatggaaaaatccaatgaactttactgttataatcagcaaactttatgggaaaaacaatgaactttacatttacctagctcgcactttgtatgaaaattctaaagaactttttggtataattcaaaacactttatggttgaatgtgctggacatttttaccaaatgagattttttttactaaatattacatttacaaagctagcactttgtatgaaatttctgaagaacttcatgttataattgaataaacttttcttctttgtcatgtgtttgaaatatagtaatttccatctctaaatttaaatatgttgatattgggcttgtttcaaagagctcaccgtgaaaaactcaaataaatgaacgaatttaattttgcacaaaagtaattaaaagatatggtgcaattttgtttggaagagctagtagcataggcacctgcagcttgtgctagttgtattagcgtcaggcatgcaaacagtgggccatagggaatcaagcagagacatgggaaagagaaaatatgggttgggagctggtgtgggcctgagcgcgctgatccacaaggtgcagcaacggcgaagatactggttgcgcgcgcaaccagttaggaaaggacttattcgaatctcaccatgaaggcatgaaccacaaatgagctctattggccatcatatattcgcataccctgttagctaatctatcttctgcatccaacctaacggtgacagctagacatgagatgtttcgtcacgaaggtcgaaagccaaactacgaaactagttatggatcactatgtatgtagcagcagcagtagtgccagcatttatcgtgggttgcctaggacacatttccaatgcttcaagtcgaaagagtagctcaacattcattccaatttcgagtattggctcatactaaagaaacatagtgtagccgtactagcaatgtacgctcggtaggtctgaggagccacttcaagtcagtcatcaaccacctgaagaacatcatagcggttattgaggagattgggcgagtgtttctttaggtcagggtcggataaagtgtcctaggagcaatgcaaggtcagttggaatatggtctatatatatgctggcacaccagatgattgggtgcgcttgatctccacaagtttgcgggggccttgcatcaatgttagttctggtttgagtgtaaagacccgcggtgtgtgccggtgcccggtggagcttggcaacccttaatgttatgaacatatacccttcttctacctgtgaccaccatcactgacttgccgtggtcgacagacggctggccaaaatttggcaatctgcaagaactcaaacaaaaagatgtagaaaagatggatctcaagataattagcttgtccatacatacacccttcatgaccattgatggattaaaaaattgacatgcaccatgtccattggatcctccacatccaataatgcgtctcgctttgcaccaagcttgcccaattccaatttcaggacggcatcgtgaacgacttttttggaatttcgtcgggtcaggggtctactcgtcttcttcagcccactaggcgcatttcatggtcaccacatcaacggacatgaagccggtcagctatagcatctgggcgccttgacatgcaaattattttcatgtcttgtcatgaaaaatagattgaacacatgtatgaatccggccatctatggcaattggcacacgcctatgacaaggcggcgatcgaggtgcctgtgaaggaagctagtagccattgcattttatactttgattcttatgctttttctatcaaccggaccacttgtaactctatggcacatgagcttgctaagctgggcgtaatttctgaatcgtatgattctttctaggaggccgtcaccccaactgtattgtatacctgttagcccggacaccttgtagtcttgttcaaaaactaggccggaatgcggcctttccgaactttgtaaccgaaagccaaatgtcctggcacacaacttgtttaaatacatgttcgtgaaccacatttggaacacaatcaagattttgattgatcttccaaagacgcgggcaagtacttccgaagatatcttcggtccacacttggtgggggcaccattttttaannnnnnnnnnnnnnnnnnnnnnnnnnnnnnnnnnnnnnnnnnnnnnnnnnnnnnnnnnnnnnnnnnnnnnnnnnnnnnnnnnnnnnnnnnnnnnnnnnnnnnnnnnnnnnnnnnnnnnnnnnnnnnnnnnnnnnnnnnnnnnnnnnnnnnnnnnnnnnnnnnnnnnnnnnnnnnnnnnnnnnnnnnnnnnnnnnnnnnnnnnnnnnnnnnnnnnnnnnnnnnnnnnnnngggccatctcttgcattaaacgtctgcgcgcgccgccaggacagaagcctgctatgcatgcacccaacaaaccctgtctgcatgcgtcgatcgagtctgcatgcgccgatgccacgatcccatgatgggccaaccgagcctgcatgcgccgatgcgtccgtcacaatgcactgaccgagcagctttcttgcacgccagccgccacggatgcagcgacggtcactgccgctggtttctctcttctagctaggtggctacatatttgtggcttgtgtaaaaaaagagccactcccttgcttagttgtactcattcatccctactaacaaagcttgcttgcatgcactagctaggtggttactaacaagggaaccctactaacaagccgagctctctaagaaaataatcaaaaaatatgcagtcccaatatgtagatagagccaacaagcccatagcacgatcacatagctcaaattaggaagaacttaataatagaatagatagaaaacttaataataaaatttaagaaaagggccaacaaacccatagcaactccaacatagttcaattacgcatagactaaaaaaagatagagggcttagaaccctagccgccgccttctnnnnnnnnnnnnnnnnnnnnnnnnnnnnnnnnnnnnnnnnnnnnnnnnnnnnnnnnnnnnnnnnnnnnnnnnnnnnnnnnnnnnnnnnnnnnnnnnnnnnnnnnnnnnnnnnnnnnnnnnnnnnnnnnnnnnnnnnnnnnnnnnnnnnnnnnnnnnnnnnnnnnnnnnnnnnnnnnnnnnnnnnnnnnnnnnnnnnnnnnnnnnnnnnnnnnnnnnnnnnnnnnnnnnnnnnnnnnnnnnnnnnnnnnnnnnnnnnnnnnnnnnnnnnnnnnnnnnnnnnnnnnnnnnnnnnnnnnnnnnnnnnnnnnnnnnnnnnnnnnnnnnnnnnnnnnnnnnnnnnnnnnnnnnnnnnnnnnnnnnnnnnnnnnnnnnnnnnnnnnnnnnnnnnnnnnnnnnnnnnnnnnnnnnnnnnnnnnnnnnnnnnnnnnnnnnnnnnnnnnnnnnnnnnnnnnnnnnnnnnnnnnnnnnnnnnnnnnnnnnnnnnnnnnnnnnnnnnnnnnnnnnnnnnnnnnnnnnnnnnnnnnnnnnnnnnnnnnnnnnnnnnnnnnnnttatttggctgtggcaatatcggggtcaaatgtgaagttagtagcccgttttcaaatccaccgcagcatcaggagtgtacacgcgtgggaaacggtggtttgtaaagaagaagaaaaagaagctaattgcacgcatcggaatccgtggtcaaaccctatattatatgaacaaaaagagacaatttttgaagagcttgtggcctttttgaatgataaaaataaatttggcccttaaaaatttggtcattttacatgataaaaagagatagagggcttgtggccattatacaaacgcaaaatgacccattttttgatagtttgtggccattttgcatgataaaaataaatttagcccttaaaaaattggtcattttacatttgtatagaaacaaaagaacgatgcaaaaaatagaggaaacgatgcaaaaaacaatgcaaaaatacagagccggcacgttcacaaaaaacagagcaaacgatgcaaaaaaaaacgacgaaattcgacggcccaaccagagcttggtttcctgttgggcccaataacaacgttttttttcacggagtcagtggtgggcgagcagccaagcacaaccaataggatcacctctcgcgaatcaccccacgatccagtgattcagagccgtccttgtgatccaacggcacggagcctgcacacagccaacccacctagttccttttataaggccagatctgagggctgtcgcttggcgcgagggtatgatcggacggctgacgttgggagctagggttaggcaaaacnnnnnnnnnnnnnnnnnnnnnnnnnnnnnnnnnnnnnnnnnnnnnnnnnnnnnnnnnnnnnnnnnnnnnnnnnnnnnnnnnnnnnnnnnnnnnnnnnnnnnnnnnnnnnnnnnnnnnnnnnnnnnnnnnnnnnnnnnnnnnnnnnnnnnnnnnnnnnnnnnnnnnnnnnnnnnnnnnnnnnnntggcacnnnnnnnnnnnnnnnnnnnnnnnnnnnnnnnnnnnnnnnnnnnnnnnnnnnnnnnnnnnnnnnnnnnnnnnnnnnnnnnnnnnnnnnnnnnnnnnnnnnnnnnnnnnnnnnnnnnnnnnnnnnnnnnnnnnnnnnnnnnnnnnnnnnnnnnnnnnnnnnnnnnnnnnnnnnnnnnnnnnnnnnnnnnnnnnnnnnnnnnnnnnnnnnnnnnnnnnnnnnnnnnnnnnnnnnnnnnnnnnnnnnnnnnnnnnnnnnnnnnnnnnnnnnnnnnnnnnnnnnnnnnnnnnnnnnnnnnnnnnnnnnnnnnnnnnnnnnnnnnnnnnnnnnnnnnnnnnnnnnnnnnnnnnnnnnnnnnnnnnnnnnnnnnnnnnnnnnnnnnnnnnnnnnnnnnnnnnnnnnnnnnnnnnnnnnnnnnnnnnnnnnnnnnnnnnnnnnnnnnnnnnnnnnnnnnnnnnnnnnnnnnnnnnnnnnnnnnnnnnnnnnnnnnnnnnnnnnnnnnnnnnnnnnnnnnnnnnnnnnnnnnnnnnnnnggtagggttaccttctgtttttgaaaaatttaaaataataaaaaaatcnnnnnnnnnnnnnnnnnnnnnnnnnnnnnnnnnnnnnnnnnnnnnnnnnnnnnnnnnnnnnnnnnnnnnnnnnnnnnnnnnnnnnnnnnnnnnnnnnnnnnnnnnnnnnnnnnnnnnnnnnnnnnnnnnttgattacaaatgggttgtttaacctagcctcggaacttatttggagcacatttctcaaattcaaatttctttcaactcgtctaaatcatcttaaattttgcacacatgatctcctacacaaacatagatagttgataatacatctttattaaaatgttgttttttgctctgttattggaatatttgataaaagggaacccttgataaaatgatggattgcaacatattttcagcatatgtgtgatcattgcagcacctgaactttcaaaacactgaaacaaatcatagaagataaatttaaaaacacaaaaatacccaacatagatagccacatgcatataaaattcatccaaccaccaaaaggtaacccacatcctattcacaaacatagttcacccacatagttcggcaaacaacctaaagtacttaaaacacatcataacatcagggaaggggagacaggactttggctagggcagcatgttgccacatgatcttgtggtcctcgccgtggatggccacatcttctgcatgagctagaaggtgaacgaagcggacaaacttcggctttggcttggttgtgcagtaggggcagcgccaagttttggtcctgctcttgtagtagtaatccacgcccttgatcctgatcttctcctcttcattctctttgaaggaggtgaagttgccgcggtccacatccacatcttccccagagacatactgcacagacaaatgaattacattggtacattatagattcatgggaatacaccatgtcaaacgaactaaatgaacaatctaaatttcaagtaggcttacctcatattcttcgtcgtcaccatacgttggatcgtacgggtcgtcgatagtatagtctatcttcctcctcttccctccaccatcatcctcctgaatatacaattacatccgtcactagtaaatacataagccaattgaaaatttagatatgcacagatgacacattgaccacagctctatgcattgaaaaattacatccatcagaaatgttttagaagtggggttttatatttctgtgcccctaagctctatgcattcagaagccacatccatcactagtatatcagtgtattagatttgtacacacattgatcaaaaaccccaatatgacattcaaataacacattgatcattggtcatgcacacacattgaagaatagaactaatataagtagcattcaaaacccaaatatgagtagcattcaaaaccaaatctaacagggacccaatctaaggcaacgaatctgagtagcattaaaaaccccaatctgtgagcactaaaaacaaatctaataagcatcatagcattaaaaaccccaatctgttcacaacatctagcatttttgcaacgaatttatccaaatctaaaaaccccaatcattgcagcatctaaaatcatagtttacaacatctagctagcatattcgcaaccaatttatccaacaaaccctagtccaaaaacccccatccccctaacccataccaaaaatcccggcccatccgtcaaaccaactactctaaccatctaaactattgtatgaatcacaatcgaactaactctacaagctaagcaagtgcaaatacctgctcctccacggcaggcggcgcaacaggggcatcgggatggactgcgccgctcgacgccgtcaccttctgcagcgctgaggcggagcccgccacatccgtagcggttgcgagtttccccgcaccaccatggatgccgccgacatccgcggtcaccgcgtcctgaccctgcagctccaccacatctctggccgatgcgcctgcgtcgccacgagcatcggccatctgatggatggatgcgatgaaggtgaggaagaggatgcggtgggggagagcgagacggtgcgatggaggcagtggaggagagcgagacgacgacagcgtggagaggaagacgatgcggcagcgaggggatttggggggaaatggtagggcgatggaggtggttgccctctttatatgatgggacgtttccggcatgtccatggacacgtgctaccccacgaccgcggtcttgcatgcgcccatgtatnnnnnnnnnnnnnnnnnnnnnnnnnnnnnnnnnnnnnnnnnnnnnnnnnnnnnnnnnnnnnnnnnnnnnnnnnnnnnnnnnnnnnnnnnnnnnnnnnnnnnnnnnnnnnnnnnnnnnnnnnnnnnnnnnnnnnnnnnnnnnnnnnnnnnnnnnnnnnnnnnnnnnnnnnnnntttgaaagagggcatagcttcatcttggtgggggcaccatttttgaaagagggtatagaagaacagaagccaaaaactaacatttttgttgcgcgtgttgccgaaacatggtaaattttcacaaagatctaccaccttctgttnnnnnnnnnnnnnnnnnnnnnnnnnnnnnnnnnnnnnnnnnnnnnnnnnnnnnnnnnnnnnnnnnnnnnnnnnnnnnnnnnnnnnnnnnnnnnnnnnnnnnnnnnnnnnnnnnnnnnnnnnnnnnnnnnnnnnnnnngtcaattaaaaatttccaatcttccggcacgatacacgccgccgccatcctcctgtctcaaaggtggcaaaatgggtccggcttagcatgctggccagatagcccgggtgcccaacctgggctgcgaggctgggcatgagtgtcggcaggacacgacccatttactttttattttattaaatatagtaacctctcaaaacagcctagataggcccaaaatagcccaaaatagcccaaaatagcccaaaattagaaggtctggtgggctaaacatgcctatgggccagctcatttccttgttgtgtcgtgcctgggccagggagcgcgacacgagtgccggccagacacggcctgcatattaggtatgccttgtcagtttaggctaggtcagtccatgctgtgatggcccatctagccagttctgtctgtgctcgtgtgagcgccaccccgccacctgtcggcaaggaggcgtgagtgccagcctcagcaccgtgccctacacccttttaccagagtggcatccgaacctagttcgcttagagcaagcagtgatcttattaccacagtggcatccgaacctagttaattagcttggagacnnnnnnnnnnnnnnnnnnnnnnnnnnnnnnnnnnnnnnnnnnnnnnnnnnnnnnnnnnnnnnnnnnnnnnnnnnnnnnnnnnnnnnnnnnnnnnnnnnnnnnnnnnnnnnnntttggagtgcttgcaaactttcatcattaaatgacacgctcattattattttgccataatttccaccacattgatttttttgtcacaacttccacgattctattttatcgtcaaaatttacaaaaactcaaaagtgccagaggggccccataggccatggatgccctgtgtaggcacccatgtaagatattattttgttgagtctggcacccctaaggctttgtttggcacaggaggttttcaagcccctaaggggctggggattttaggggatttggtgaatccctgccctccaccaatcccctcaaattcccttccattcatcaagcaccttccagccccaagcccctttctctaaaatcacgtgtttggtacacaagcgaggggagggaacgggaatgggaggtgttgtggggatgtacctccggcgaaaaggacaacttgtcatagaagaagaggaagccgacggcgacaacggcggctcaatctcctgcggcggtttttgcggccgctttcttccatctcgtcatgttccagaaaagccgcgagctccacctcgatgcgcagaagccccgtggattgaggaggatttcacgggatctagaggggctggcccggtcaagccttgtatgccaaacagacgcttaggaaattttggggctttttagcccaacagggataagcccgcccaagcccctcaaagccctgtctaccaaacaaggcctaaggaggcgcctagccacgctgagccacccctggcccgattccaggccccaggtttctctcctgttgcaaaacttatttgactcatttacttaatttttaattcacacnnnnnnnnnnnnnnnnnnnnnnnnnnnnnnnnnnnnnnnnnnnnnnnnnnnnnnnnnnnnnnnnnnnnnnnnnnnnnnnnnnnnnnnnnnnnnnnnnnnnnnnnnnnnnnnnnnnnnnnnnnnnnntagtgcttgaaaaagtagatatgtttgagacttatgaatgagaaaatcatcacgctaggccagatggtgtgaacattgccaaagaaaggaaaaggaatggaagcatcgacgtctacaaagaggagctttgtgccatgattgagaccaagagagcattgtcgtctgaacggagagaatagtagatggtgatgtggaacaagctcaagtccatgaaggagatgtgaagagcaaatgctattgcagaatcatacgattgcattcggcgaggagaatcttgcaaaagtgaagaaggttgaagagtatggtaccatattcatggttccgagcatgaaggatgacacaacgagacaatattgacaactttcttgtggtgatattttggcaaaattgaggtttcacccgagttgatctggtgtagtatatgaacttgataggggttggtccacgacgacacgacgtgtggtgggtttttagataaacttgatagtaatgtcttttggatgaaatgtatggatgtttttaatttgaattactcgatttcatgaactatatttatgcttgtagttgacttggtgcatatgatgcatttaaatcattgaaatcggtgatgaaatattgtgcgattgtctaaaaggtactagtatgtgacaacggatggaagaattagcccagtttttcttagagtttaatatgggggttcgcgttagctccgtcacaaaaaaatctttctttcccctctcacaaggtgactaggggaaaacctttctcgcctcaatattcacaggcgagcatgtggattgcctcccctccgttggttgcttcgccgaccactgaaggggaggggaatactgctgcctcggctcccgctagtagatatgttagggtttttagtctttgcaggggcggtacctcttctttgattcaatcttttgagctccgatccccctcaactttgtcggtaggacagattagatggaggttcggcatagattcctactagttccttgggccgtcgaggttagggcttctcatcatgcgcatgcgttgctaagatttgatgtcaggttatcagatcgatttaatgggtttaacagcaatgactgcggatccagggcgttggttccgaggggcatgtgcatgaagatatcccgactgtcatcaacaaagtacccgtgtgtagacaactcgttcggacggttgtagtggttgttctgatgatcagtgatcggagatcttgttgttttttttattatgcttggggtgctttgtacttctgatgaacctttatagaactataacggagtcgtttttagtttctttaaaaaaataagatttgagggagagatgagagagttataaataggtgttcggatagaggcgccctatttttactgtcagcaaagcatttgagttgttgaacgccactagagcatgctttcataacactgagagacaacctctcccgatctaatgagaccacgcaaaacctttgcctccgtttcatcaggaaggaaacagacggaggtttcgactggacggtccatcgaatcaatggacggcaccagaaatctctccattgatggtttcgtcggttcggctaagacaggcgggctgtgatcgtgattgccagctattcatcagacatgcactagttcgatcagtcccgaagagaggattaccgagtaccagatcgtagattcgtagtacgtactatatgtggcttatgtgcatgtgcaactgcattggtacagtaccggtttccatctccttccgtgcgaacacaaaggagacctcccatcgctatcatccatcgttattcgttaggagagttagctcaacttgttggcctacttgttgcgaaaataacatagcacgagtatatttgtctaccctctaattcctccgtcaaattcgtggtgcagctcacaatgcgtgtttgaggctagagggtagggacatatttatactcatattcctgaaaattcaaatccgtatccggatagaattcagttagactcctaatcgaattaaccaaccacgatcataaccgattatttttcgagtcaaattccttcttatccctaagcacatatatgtgagatatatgccacgtttaaatagtatatgattcctatttaaatgtgtagacttatcaatttacagagctgaacctgtaaatagcctagccaattccaaacatatactgtgcccaggcaaaataattccagtgtacatatacacaccgtattccagtatagtttgtacccagctccttaagtaaatttcctcaagttcaattgcaaatatttgtaccaatcattcatacaccaatttcatatgatttcattcatgaaccaaataaatgtagtatataatgttttggaagacactaaaaattcctacactactcaccgtaccagccaaccacaaatcactgtccacacaattttctcaggcccatgacaaaaggatcacagtggcgaagcggaagctagggnnnnnnnnnnnnnnnnnnnnnnnnnnnnnnnnnnnnnnnngaggcgatggtacttaaggatgcttgggccaactatgggtatggggtcaagttatggatacgttcaacagggactgctgtacgtcaacagcatgaaaaattaatgaactgattgtgctcaatgctttccaacatatggagatgccatacgacggcttttgaagcggatatgacaaagctaatgcccaactccttctactatgatgcctcaagctttgttcttgtgcagaagacgacactgtccattttccagtggcaaactgacactgtacattcacaacttttttcatcaggtacaaagcaaaagtcacacgtgaggaaatgagaaacctgaacctttcgagtacctttttctaaaaaataatcctttcgagtagtatgctgtttaaactcgagatgcatcgcatcatcaatagaaaaatgaggtttggggtgtatatatagcagataaaaggttactgcgtacggtggcatggcagatttaagacattgatctacactcggctcctcatcacacacctttgcttctttaaaaaaaaaatccaaaacacagaagatattacagcttcacagcaagtgcgcattcatcgtgagcatttaatttgcggtacatacttttcaaaaatcaacaaatattgttcatttgcgattacagttttatctcaagatgcactgccatcacgctcacaaatgcacaccgtatctcccttctcttactgattttttgtctaacttggtcgcgagaattctctcctctctatcagtgaagtgatacgcaatttctatattcacgaaagaagagcatgctgctctttgtagcaaaatgtacttatgttaaacaaagatgggattgctttgcttgctttccatgtgattttctaaccctctcagtctaatggcaccgagtctaacggccgctggaatcaatcatcactgggaggcaccaacgatttctccaccttgcacgtcgtccagactccaaggagaaagctactactgctggtagtaccaagaacgcaggcggtcgaggttaggttaggataggcaggcgtggccagtgatcctatatatcctatgctcgcgattgccggctgctgcgagtcagcactcaccagctggatcgatgtctcgcgtaaaaacaaacaacactgcagagcagatcgcatgtagctgatgtgcgcgtgcgtgtattaaaaggtagaaatcgtacaaaacacaacagaatcagagttgggcagtggaagagtggtgggtccataacccactggtcctaggatcaaaagcaaggcggtcagattgatgttctctgagtttcaagtgacggcgcaaagccatgcttggactaactacgagcacaagttatgaacacatttaactggactgttgtaggcaaagaagatgaagaatgctaccccccaaaaaaagaagaagatgaagaatgttttcaaaaacccagcattcgggaattgttccatggcagcttgttgaagcgaagaagacaatcaaatgctcaactagttctatctatcatagcnnnnnnnnnnnnnnnnnnnnnnnnnnnnnnnnnnnnnnnnnnnnnnnnnnnnnnnnnnnnnnnnnnnnnnnnnnnnnnnnnnnnnnnnnnnnnnnnnnnnnnnnnnnnnnnnnnnnnnnnnnnnnnnnnnnnnnnnnnnnnnnnnnnnnnnnnnnnnnnnnnnnnnnnnnnnnnnnnnnnnnnnnnnnnnnnnnnnnnnnnnnnnnnnnnnnnnnnnnnnnnnnnnnnnnnnnnnnnnnnnnnnnnnnnnnnnnnnnnnnnnnnnnnnnnnnnnnnnnnnnnnnnnnnnnnnnnnnnnnnnnnnnnnnnnnnnnnnnnaattttcgccccagacacctcagattatccatgattgagaataataagttaattgtaatttagtcttatgattacattctttttcataattaagccactaacgtagtatatttggccaaaatagtacacaatcgtccaaaaacatactaaaacaacaacaactgtacaaaataaaaatattttttcttgattgagaactaattattagactgaccaaaagaatcactcaattacaaaaataaataatcttttgtatcaatcacccatggattcaacaagaaatgccaagtgcttgcatttagtgcacgcatatttatcatcagctactcatgtgctgtacatcttccaatccctaatgggcacacaaaatcaagcatgatctcattcacaaaaatcatcagctactcaccgtgcatgcgcacacgatctgttgaaccagtctccgaggagtataagttgtcaaatttgtacgcctcttcaacagaatcgaagttagtaccaacttgtggattaacaacacaacctgtctacttatcagcataagcacgaactgaagcctccagggaagtcactctgctggggttgctcttcctctcctctgcagctttaccaattcttatcctgaaaagtaatcggaaccacttgttagtaggatacagctactgttttcccgctcgatgactacaaacagctaacgaattaaagatacaaactatgatcgaacagatttacgaaaaaatcagacacactatgcaaaaattcgcttgatcaatacaaggttcgtnnnnnnnnnnnnnnnnnnnnnnnnnnnnnnnnnnnnnnnnnnnnnnnnnnnnnnnnnnnnnnnggcttctttggccatcgcagcgccaatatcttctggcagatcttgcctggatccgcaacagcttcactatgaccgccgtatgagcctgtaattttttccgtgaggatcgtttcttccgtttgcttgtccccttctatttcccgagcgtatcctccccctcgcccgtctcggaagaaatccgacaatcacggacaccatgggatttgtttgcccatcaggaacaccctctcttaagagaatcccggcgtccaatcgaggaacaaatctgcaaccacgccaaataaaaacagagtcagatccgactacggatgacgaatgaaggagaggggagtatctaaatttatcacacaagtacatcaggcacctagcacacaagatctggcagaacattaccccgattcgatctcctcgaagaagaactccatccccatccacggcgacctcacttccgcttatcctgcgaggggtaggggatgaccagtcaaaccacgcgcaccctgcgattaatcttgtctagatggcgcaccctgcggatcgtgtagaagctgatgttacgcgctgccagaacccacacaactaattaaatgtccgaccggcacatgatgtacttacaatctttgcacaccacggaggcccacgtataaacagagaacactgagatggcaccggtgtattcccacgcaacagccgccgtatactaatgaaaaagctaggtgcgcggatcacaacgacaaaaatggctggacgagattacggccaccaggcagctccgcctccaaaacgccaaactcctatcatagggcctatatatcctcaagctttgttctagtacagaagatggcattgtatctgtattcattttcagcaacaaaatcacggttctaacctcaacctttcgcgtgaactttacaaaattatacagttaaaaactcgatatgcatcacctcaaaataaaaactaaagaaatctaggtttggtgtgnnnnnnnnnnnnnnnnnnnnnnnnnnnnnnnnnnnnnnnnnggagtattatttttaggacataaaggtagtagggcaagatgcatggcagagcatcatagattcattcataggccatcaggagctgcaaattccctagagagttccactaaaaaacaaaacctcttaatacagtggtttattacaccgtgctccttaacatacacttttgcttgaagattaaaatacaacaggtaatacaagttttcggcaaggtgaaatccgccaagggcgtttgtggcgcatactttcagaaaatcaacagataccatttgcggttacagttatatcattaaacacactgctgtcatgctagtaaatgcgcatgatagcttatttcttttaccgattttcggtccatttgaccgccttgaaaataagaaatatataaattcatatgtattgtttaaccaaagcctaatgcatcattcccagcaagaagagaaaaaggcctaatgtatcactgaatctgatcctacttgctgttgctccacagtatctcgacaggttcaaaactttgaactctgggacagatgtataaatgcctatgcaaattgcaagctttggcatggccttttttttcgggtgttggcatggcctttcggtccttcaaatccaacaatgttgctacatatggaccaagcttgctcaagtccaacttcaatagggcatcacgaatgacattgtttgaaattccaccgagtcaaggttgtactcagcgacttcagcataagaggcacaattttgtggtcaccagtcgactctcatttcgaagccgatagtccagaacaattggacgcctcctaaatggaaatccgttgcatgtcttatcatcaacaaagtagatcgtacgtagctgatgtgcatgtgcaaccaccttgattatcagctaagttgtctgtcaccgttagcttaactggttggcctgcttacgtcaatcgacaaacccatccgtcaccaaaatctctgggttttgcttcttccggaaccaggacctgagtgcttgtatataaatgtttagattcaagctgtgacaagaaaatcagagtggggcagccaaagtgnnnnnnnnnnnnnnnnnnnnnnnnnnnnnnnnnnnnnnnnnnnnngataaatcttatgttttttttgtttcctgttttttttttgtcacaactgtttcctctaataaatttgatttatcttgttttaacatcctgtcactttggtgagtgacgtgccatgtttgcttcaaaggtggttgaatttcagatttaccgagcatatgttcattcaaaaccattgttcactgaaaattccagtgatggtgcggaaggatgcttgcaccaactatgagggcaagctatgaatgaatgcgtttaactgggactgttgtaggtcaacagcatgtagtggaacgaactgattctgcctcggtgctttccaatactgagacttaggtgggcaccacaaagagtcaacagttcttcaacaattacatcccctgctgtcagactaaatgtcccgaggggtagaaataaatgtcacgtagtgaaatttccaagggaatgagatgcatttggaatttgattggaactttggagaacaggacatctctgaagtcctcttctagagtcatagtgcatgcgcacatagccgcttctacactgttgcattggtgcaatttaatgtagataatttcgagtttgagattactcacgagggtgatagggttgaactgagcaagccattaccgtgagtgctctctcaagtgcactggtctccgattcacggagtttctacagccgttgagggcagcgaggttttgtttaagggtggccggcagctgctatccaagggccgcctgggaacagcatatccagcaacgctagtttccatggagtgttagggctcctaatcccatctcattttatagtgaaagaaactactctgttgattcacaaaaccaagaacaggacagggcaaaaatttgctactcccacaatttattcacattcaacaagcacaagcatgttactatccaaggaataaacaaccagagctttctttcctcgtgttgcagttaaaggtcgatgtacaacaacctcgccaaaatacacaactcgatatgcaaccagaagaaagggaaaacgtccactgttagttcacttcacagtacaagcaactcaggttagtggtcttcagatggtgatgaccctgcacttctccggcgggaagacatgctccatcagcgggcggccggcccgtccatgaggacaccaggaaccgatcgaccctggccgccgtgtccatgtggattgtcaccgtgctcagcccttggcctacaggtgctagaaggcgaccatggcggcgaggctctccgccaccttggcggtgccgcccttctcaggcgatcagagctcggcgcctccgacgacgaccatggcgtggaactttggcacgtggtccgggccctggcgccggtcggtgtaggctggcaccgcccaccgccggcacaggttgttgagcttgagcttgaacatcctggcgccgcgaagaattcagctgtaggattgggaggggcaagggaagatgggattgatcagctgggtaagaatggggaagagaagcatctcctcgcatgctcgctacagtcttttcgatggatttcggcatcgcgtgcattaattgcatacgctagacaggacagcagtgcaacgctaatttctttccccctttgaaagtaagctgcgcatccaattagtgcacgcgacgccggaatccatcaaagagattatagcgagcaggcgaggaaacgcttcacttccccattcctagccatagatcatcatgtcgatgaccacgagcacgcagtgggggcgcgtgagcttgcgcgcatgggactatctgatgtgccgctggcgcatcgatctcatgcatgtatggtaacaaatcttgtgcatttttttccttgagttggaccatatcatatctcgtcatggttatttttaggttgctaaccacacataccgcgtggtaacatatctaacagaataattgatcattacatacataaaatctagttattatacgcattccatgcaaggggcannnnnnnnnnnnnnnnnnnnnnnnnnnnnnnnntaaagggaggtgatattgttggtttcgtcccgcttagagataattttatatatagatgaggtggtactaattcggggacctatatatctatcttattcggggatgaggattacctagcgtacgcgcctgggctggagcgaggtgcgcggaccgagctgggccagatatgcacctttcttttttattcatcgattcgggagcgtaaaaaaggcaatggtccgggagttcaaacccatgattttccttatccctcaaaggctagctaaatgctcaattaaatagtcccacatcacatattttcatcaaagatcatcaatttatatatggaccactcgaacgagaaaacaatcagtctcaggaataaacaaactgaggtaagatgtgggtctcggtggtatcttgctgcaggatgaaaaaagaaaaaaaggaagaagagatatcaaaaaagatgagtatgaacgtgctcgaccagggcttcgccgcagcagagcttggctgtactcggccatggccagcacccacgggaggtcccccgtcatcgcccggggctcggaggaccggcgagtcaagcgaaaaccgcgaccacggcggcaaggtggaggagagatggccgcggcagctatgctcgggagggcaaagaggcagacggaattgttggaggttggggctggccggttcaggcgaggaacggcgcgggccggcgcatgacggagtggcgctgtgtgaggtgggccgtcaaggaagtttgccggcgaggctgtgcacaggggtgcagccgccacggtggtacccatgggcgccactccaacaggagcaacgcgcggttgctgagggaggtctcgccacctcggtgtaccgccgacagacgagtatggccgaccacccagctgctccctccagcccggcgcccatcggccagattcagctacacttccttctcggctttgacgaatgcactggctgctggtagtggatccatgtgaatttttagctggtcagctatcgtgtatgagcgtacatccatgtgaagagataaggttgactacgaagagacaagtcaatatgggtccacgtgcttgagctaagaacatgacagatcaccgatgaaattcatatatgtgtattttattatttcatagttaataaaaacgtctcaaactaatatacctttacttttagaaacacggatgagatgaaaatatacatactaaaaggatggactgattgtcaactcatgccccatatactacctgtgtaataaaatataaaacgttttttaatctaaatctagaccaaaaatcattttatattttgatatgaaggcagtactacataaggtctaaattgcaaatgaaatgtttgtataagtgtatcggccactaatcctaatatattcgcacatttaaaataagtgtatatatgatctaccatctacaatttgcttgcgaaatatgacacataatttttttatcggcttatatttatatttgttcatgaaaggagagtaaatacctccatgatgctactctaaatttttgctgcatttgtacaagatcggtcgatcgttgagatggcaatattttttttccatatcttccctgtgctcgatgttcgttctagcacgagaaagatgtgtgggttggctgcggcggtagcagcagatgggcgggcgttacgccatcatcctgtggaggacatgtataagatatgtgtagtgcgtgacatgccgccacatcttcattggtgatccagttgtcgcttgtcactgatgcactcctctcttgggcaacaccagttgaaaagctcgcgccgcacggagggaaggtcttgaggcattattatcagagttagggtgtgtgatattctcccatttcaaggcacaagtctttttgccaatctactaataaagcaaggttagtttctctgattttgtatccattggcccaggttattactttttattttcattttgagattttttactatttgagatggtactgattttttttgcacacactcatcgatatatctatacaaaaataattatcataggtaacgcacagattctttttgctatgtctcaccaacttggaatattcatgagtggatggcaaagaggaaacacggacgggtagctaagagcgtgcgcaaatttgtttcctcgttgcaatgcacgggtatgtttgctagtctcccataatgcacttgcgcacagcacaggaatatctcaccctttatgcgtgtatatacggtagtaactaataatcttaatccaattgcatatcattactactataactttgtgagctgcaaaccgtatcgtctgtgtatatataaggattgtgccaatgtacatcctctcatcaatcaatctgcgtgtatctctctcatagttattttagactgcacccnnnnnnnnnnnnnnnnnnnnnnnnnnnnnnnnnnnnnnnnnnnnnnagctacgatgctatcccatggagctaaaataactgagaacaatgcacgtctcagctaacacacatcttacaacctcggttctgagctaacacggttcttcaaccaaacttggaagccaagtactcaatgaatgaaaaataaacaacactcgattgatagatcatcatataggcacatgacgaaagtatagagagccacaaattctgaagtactattaatgttcggtcatccaaacttcatacaagagggatgggaacttgatgctctcgggtacccacgcacccaatatgcactagaaaaannnnnnnnnnnnnnnnnnnnnnnnnnnnnnnnnnnnnnnnnnnnnnnnnnnnnnnnnnnnnnnnnnnnnnnnnnnnnnnnnnnnnnnnnnnnnnnnnnnnnnnnnnnnnnnnnnnnnnnnnnnnnnnnnnnnnnnnnnnnnnnnnnnnnnnnnnnnnnnnnnnnnnnnnnnnnnnnnnnnnnnnnnnnnnnnnnnnnnnnnnnnnnnnnnnnnnnnnnnnnnnnnnnnnnnnnnnnnnnnnnnnncttgtttggtagcaaaaaagattcggaattttttgaactatttttgaattactatttttttgcgtatagggtgcgccgatacccatgttctcattcgtagtttccaatacagacgggaacttggtgttctcggctacccacgccccctatatgcgccaaaacaattagtaattcagaaaaagttcaaaaaactcctaatctttttggaatcaaacatgatcaggtattgtactcgtaaaaaaagttaggacaagaaatgattccaattgacttcacaagtttaagatgataatattgtgtgtatagtacttgtttatggcccgggttctcctttgtattttctcatacaagaattgctaacctgcagattctttagtagctttgtcaccacatcaagcagcttctcggtcattctagtcggaatgttgtaattacacagattcaactcactggaagaaaatcatgtggcagcgcatgtttaaagaagccattcaattaaggttgtgcagagctcgttatatgccttgcaaacctaagctcgttaccaacatttctttggactcggacctctttgttgagcttaaatgaatcctgttgaagttcacaaaatatatgttcttgcatgatccacaatttttcattctttgaggattcttgcgaggaagatgcaattaaaccatggcttgaatccgagtgtcataagtaatacagattatcttccatttattgtattgttgcacattatcttccatttatattgtattgttgcacaggacggcacacggaggcggggatggatgtgacgcccatggggacgccgttgtgtgtccaatgccaacatgccatgtcacgactcgacgtttccgacagctgcccgcggcacataggtcgcttgcgaccccgtcgtgctcctggactgccacaacggcggaacgaccctgcctccatgtatgccccatcctcctcccactcttcttgtttgcttcaattcgattctcatctctgtgcgtgtgtatggattggggtagcgactgatgtaagttggacaggagcaagggcaccaatcaattctgatgcgttgaggcaagcaggaggttgtgctcaggagggactggaggtctacgccatgatgccggtaggtacgcccacgaggagtgaaattaaatgatccacagtttctctcagttttacgcccatagaaaactttagttttgagcaacacatgttacctgatcatcactgaatcagttacacgcttgactatctggaaaagatgaacgtgatcccactgtttagtagtaaaccatatcacttgatgtccattgttcactatgagcgaatctcacaccgaaacaccaagtttgcatctataggaactgttgtactctactaaaaaaaccatttgacatcatatctaccaaatagggaataattaaggtgtcggggagttagcacaggactacgcaactccagtaagtaggaaataattaatatttgataacatctctactaaatagggaataattatctctgtcaataagcagaagcaaacaacttttgatcatagaaggaaaaaaagataattatctcatttcagtccttacagcagcatgccaatttattgatcatttatatgccttgtactaaattatgagtatgcatcagaggggataataatagcaccttatatgagcgtgaattggagaggagattgtatgatgggatttcttcacccttttcatttccttctctttaaatatgatcaaaccagcatcctgtacatgaataaaaaatgtatgttaactgatgaattttttcctatgaaacagagattttgagcataggaatccagttcatacaaatttgagaatgagaactcttaacatgtggaactaaaagtttatggctaaaatatatataaccacattagtttgacattccgaactggtcagagtatgtatcggcaattcatcatcatgacgatgtcaataatgtaaataattaatgttaacaactctatgctccattaatggggtgaaatgaaactgtcatagtacacaaagtctcggttaccttatatagtgatacgcattacagatcaagtaaacttgaaaatattacgtagtgatacatacactgtatgtatgcattcatatatacagaacacagttccttaatttgaattagctcaagcaggattgtactgactatgaaaagatcttctgcatggaaagatcaccatagttaacttacagtatcaagtgatatgcatgaccaagtgtgtgaggagggcaataatgagcatgatgagtttcaccagtcaggcagtgcaatccccgggaatgagatgcattgggaatttgattggaacattaatgaagtgctcatctccgatagttaccgtaagcacatagacgactctacaccgttgagctcatgcaatttagtctagataatgtctgagtttgaggataccaactagagtgatacgatagaactaagcaagccatagggcgttttgggaattacttcatcagatgcttaccgcgagtgttctgccatctctacaattccattcccatatctgtgacatccgtcatggcagcgtgttggagctgtgagtgcaccaatctctcagattcgcagagttagggttcatggcatctccgattgnnnnnnnnnnnnnnnnnnnnnnnnnnnnnnnnatcgctgcactttgcaaccctcgaggacagtgaggttttgtttaagggtggccgggagctgctatcaaagggcagcactggaacagcttatccagagcaactgtagtttccactaagtgtaagggctcctaatcttgttttacaatgaaaaattnnnnnnnnnnnnnnnnnnnnnnnnnnnnnnnnnnnnnnnnnnnnnnnnnnnnnnnnnnnnnnnnnnnnnnnnnnnnnnnnnnnnnnnnnnnnnnnnnnnnnnnnnnnnnnnnnnnnnnnnnnnnnnnnnnnnnnnnnnnnnnnnnnncatattgctctgtttcttggcaaaaccgagaatgggatagggcgaaaaccagctatattctcagaaatcattcacattcaatgtaactcgccaaggaataaacaaccctgatattttcttttgtcattgcacagttaaaagttgatgcacagccatctcaccaaatcacagatgttgatatacagccacaactcacaagaaaagaaaaannnnnnnnnnnnnnnnnnnnnnnnnnnnnnnnnnnnnnnnnnnnnnnnnnnnnnnnnnnnnnnnnnnnnnnnnnnnnnnnnnnnnnnnnnnnnnnnnnnnnnnnnnnnnnnnnnnnnnnnnnnnnnnnnnnnnnnnnnnnnnnnnnnnnnnnnnnnnnnnnnttttagttcacggtacaagcatgcccctggtgagtggccttttcaaatggtaatgaccctacactatgaggagaagttctgaaatttcactggttctgcagctacaggtcaacaaaaagaagactgaagagtgaactgattctgcctcaatgctttcacatgaagagtgaactgattctgtaggtcatcagatgacaaagctcaagattttgttctnnnnnnnnnnnnnnnnnnnnnnnnnnnnnnnnnnnnnnnnnnnnnnnnnnnnnnnnnnnnnnnnnnnnnnnnnnnnnnnnnnnnnnnnnnnnnnnnnnnnnnnnnnnnnnnnnnnnnnnnnnnnnnnnnnnnnnnnnnnnnnnnnnnnnnnnnnnnnnnnnnnnnnnnnnnnnnnnnnnnnnnnnnnnnnnnnnnnnnnnnnnnnnnnnnnnnnnnnnnnnnnnnnnnnnnnnnnnnnnnnnnnnnnnnnnnnnnnnnnnnnnnnnnnnnnnnnnnnnnnnnnnnnnnnnnnnnnnnnnnnnnnnnnnnnnnnnnnnnnnnnnnnnnnnnnnnnnnnnnnnnnnnnnnnnnnnnnnnnnnnnnnnnnnnnnnnnnnnnnnnnnnnnnnnnnnnnnnnnnnnnnnnnnnnnnnnnnnnnnnnnnnnnnnnnnnnnnnnnnnnnnnnnnnnnnnnnnnnnnnnnnnnnnnnnnnnnnnnnnnnnnnnnnnnnnnnnnnnnnnnnnnnnnnnnnnnnnnnnnnnnnnnnnnnnnnnnnnnnnnnnnnnnnnnnnnnnnnnnnnnnnnnnnnnnnnnnnnnnnnnnnnnnnnnnnnnnnnnnnnnnnnnnnnnnnnnnnnnnnnnnnnnnnnnnnnnnnnnnnnnnnnnnnnnnnnnnnnnnnnnnnnnnnnnnnnnnnnnnnnnnnnnnnnnnnnnnnnnnnnnnnnnnnnnnnnnnnnnnnnnnnnnnnnnnnnnnnnnnnnnnnnnnnnnnnnnnnnnnnnnnnnnnnnnnnnnnnnnnnnnnnnnnnnnnnnnnnnnnnnnnnnnnnnnnnnnnnnnnnnnnnnnnnnnnnnnnnnnnnnnnnnnnnnnnnnnnnnnnnnnnnnnnnnnnnnnnnnnnnnnnnnnnnnnnnnnnnnnnnnnnnnnnnnnnnnnnnnnnnnnnnnnnnnnnnnnnnnnnnnnnnnnnnnnnnnnnnnnnnnnnnnnnnnnnnnnnnnnnnnnnnnnnnnnnnnnnnnnnnnnnnnnnnnnnnnnnnnnnnnnnnnnnnnnnnnnnnnnnnnnnnnnnnnnnnnnnnnnnnnnnnnnnnnnnnnnnnnnnnnnnnnnnnnnnnnnnnnnnnnnnnnnnnnnnnnnnnnnnnnnnnnnnnnnnnnnnnnnnnnnnnnnnnnnnnnnnnnnnnnnnnnnnnnnnnnnnnnnnnnnnnnnnnnnnnnnnnnnnnnnnnnnnnnnnnnnnnnnnnnnnnnnnnnnnnnnnnnnnnnnnnnnnnnnnnnnnnnnnnnnnnnnnnnnnnnnnnnnnnnnnnnnnnnnnnnnnnnnnnnnnnnnnnnnnnnnnnnnnnnnnnnnnnnnnnnnnnnnnnnnnnnnnnnnnnnnnnnnnnnnnnnnnnnnnnnnnnnnnnnnnnnnnnnnnnnnnnnnnnnnnnnnnnnnnnnnnnnnnnnnnnnnnnnnnnnnnnnnnnnnnnnnnnnnnnnnnnnnnnnnnnnnnnnnnnnnnnnnnnnnnnnnnnnnnnnnnnnnnnnnnnnnnnnnnnnnnnnnnnnnnnnnnnnnnnnnnnnnnnnnnnnnnnnnnnnnnnnnnnnnnnnnnnnnnnnnnnnnnnnnnnnnnnnnnnnnnnnnnnnnnnnnnnnnnnnnnnnnnnnnnnnnnnnnnnnnnnnnnnnnnnnnnnnnnnnnnnnnnnnnnnnnnnnnnnnnnnnnnnnnnnnnnnnnnnnnnnnnnnnnnnnnnnnnnnnnnnnnnnnnnnnnnnnnnnnnnnnnnnnnnnnnnnnnnnnnnnnnnnnnnnnnnnnnnnnnnnnnnnnnnnnnnnnnnnnnnnnnnnnnnnnnnnnnnnnnnnnnnnnnnnnnnnnnnnnnnnnnnnnnnnnnnnnnnnnnnnnnnnnnnnnnnnnnnnnnnnnnnnnnnnnnnnnnnnnnnnnnnnnnnnnnnnnnnnnnnnnnnnnnngagggactggcggttccaacagttctgacaaggacactgtttcatttttcagtgacaaaacagacagtgctaacctgtccggctgtcagtacatttaccacgagagtaacattttcatgaagtgcaaaacagatgtcaaacgtgaggaaatgataaaactgaaccttttgcgtgaactttatagtagtatatacagttaaaactcgatgcatcaccccccatcaaaagggtaaaaaattcaaatcaggtttggtgtgtatagaagctaagcagcatagcagagcatcataggccaacaagggctgcaaattccctagatttcctctcaaaaagtaaaacctcttgccttaaaactttcgctttgttaaattcaaaacacaccatttggtatagtattacgggttttcagcaaggtgcatccgacaagagcatttgcagtgcatataatttaaccaaatcaacaaaatatcatttgcggttacagctataccaagaaacacactcccatcatgccacattatcccagcaggttaagagctttgaaagtgtcgggacatgtgtaaactatagccatgtctattgttgttccaatttgcaattattgttttgtccttgtttgttgcaatattcagttttgagttgcttaaaccgtagatgctcaccaattacgtcatctgctgtcagaatatattatatcacaaggggtagaaataaatggccagaacaactgtcgtgtgaagttcggtgaaggaatgatgtctgggccacaaaacatgtccattcgctaaccttatataaataactaccttacatgtataaaagaatcgtgtttagttgctagagagagaatgcatgatcaagtgtgcgaggagagctaaagtgattagcatgataagcgtcaccagcgtgatagtgcaatttcccggggattgagatgcattgggaatttgattggactgttgatgatctgagcatcttcagagtcctcttctatagctacagtaagaacgtatgagactctgcactgttgagttggtgcaatttagtgtgtatggcgccgagtttgagattattcgccagagtgacatggttgaattgtgcaagccacaggggcgtcttgggcattacttcctcaagatgcctactatgagtgttctcgcacctcccctagttgtttctgtattgtcccgagggtgtctggtctctcctcttgctttgggagaaccaagggcttccggtgtacctggctgtggtggatagatggaagccagtgttggactgttgcaactttcaacaatactctcttgtggggggagagtacaagtgggggaaagatccgtactatatattgaatgatgacatttctttccatttccaataagggggcatttctatccaaccataggttgttatttgcctcacatctcctttctgcgagattgaagaagggacagggacatgtttcctatgataagtaccgctggtgatgctatttcaaatgattcaactttttgtactgagcggtttcgtgtgagaaaccagtgacatgtcgataatttttgagtggggtgagggaataaatcaatcaggcttcaaagttgtagggccatgtctatctggttaagagtttacgatccaaatgtaaaaagatcaatagtttcaagtcccaaaaattccttatatgacgttttcctttcctcaaacaacaagaaagaagaagacgtgtgtgtcaaccaagagtttgctagcacaagaagacttgtgcatgagtaaatagcataaaactactactttacatgctagggttccaaaaaactaccggtttttaatttttcgctgataactaccaagttgggggttggctgtttcaaaaaaacctaatcatggagtgctttaaaattgatcgtgattatgacagttgggacccgcacgtaagaccgtttgtttgactcttatcttacaggtagggcccacgtgtctgtacctatgtaagtttttaaaaaaagcaatcaggtccctataacttttttaaaaaagcaatcaggtccttgatgttttctaaaaaaggcaatcgggtccctgatgtttctggaaaaagcattcaggacgacaccgcagctcgtcggcggccagatcgtcggccaagcgaaaggcggctgctcggccgccgcgttccttgtcgcgaannnnnnnnnnnnnnnnnnnttctctagtcgggcgacgagctaggtggaggagctcctggccatggcgcgcggctggtggcggtccgagcccttggccatggcgcggctggcgagggcccgagctcctggccatggcgcggttggcggtggccttgctcctcgacgcgctcctggccatggcgcgcggctggtgggggcccgagcccttggccatggcgcggctggcgggggcccaagctcctggccatggtgcggctggcagcggccttgctccatggcgcgcggctggtggcggcccgagcccctggcaatggcgcggctggtggcggcgcttgcatcttggtgcgctcctggccatgacgcgcggctcgcgacggcctgagcccatgaccatggcgcggcccgtgctcttgcgctgcggctgctcctcctcgcggcgttcgttcccgcggtcgagtgtgtcttggcgcgtggcggattgtggaggtggccgccggtgggtggtgattgccgggaggggtannnnnnnnnnnnnnnnnnnnnnnnnnnnnnnnnnnnnnnnnnnnnnnnnnnnnnnnnnnnnnnnnnnnnnnnnnnnnnnnnnnnnnnnnnnnnnnnnnnnnnnnnnnnnnnnnnnnnnnnnnnnnnnnnnnnnnnnnnnnnnnnnnnnnnnnnnnnnnnnnnnnnnnnnnnnnnnnnnnnnnnnnnnnnnnnnnnnnnnnnnnnnnnnnnnnnnnnnnnnnnnnnnnnnnnnnnnnnnnnnnnnnnnnnnnnnnnnnnnnnnnnnnnnnnnnnnnnnnnnnnnnnccttgtgcatagatcatcgatacatgtagtgattgtttgattatactccatgtacataacaggagcatgctttagtttgtagagatgattattactgctttcttgtagtttccatatgaccgtcttggcaactcatgtctcgcaagtcatattcagttcagtgacttactcaatgcaccagcttcgtgcaaaatttgaaatgaatatagaagcaactatactttgtttgtgcttgtcaataattgacaatctgataatggtttgtactcacattttgtgttgacttacgaacaaggttggtaccacatatattttatttctgttccatgataatggaaatcaagcaataccaaannnnnnnnnnnnnnnnnnnnnnnnnnnnnnnnnnnnnnnnnnnnnnnnnnnnnnnnnnnnnnnnnnnnnnnnnnnnnnnnnnnnnnnnnnnnnnnnnnnnnnnnnnnnnnnnnnnnnnnnnnnnnnnnnnnnnnnnnnnnnnnnnnnnnnnnnnnnnnnnnnnnnnnnnnnnnnnnnnngttttcattgtataaaaccaagagatttgtttttgttgctgttccatttcgcaatcattgttttgtccttatttgttgcaacattcagttttgggtcacttaaagtgcagatgggcaccacaacacgtcgacagttcttcaacaattgatggccacaacaactgtcatgatgtctgggcaatacaccatgtccattggctgatgttctataaagaactaccttgtatagaagaatcccatttagttgctagagggagaaagcatgaccaagcgtgtgaggagggcaacaatgatgagcatgatcagtgtcaccagccagatagtgaaatttctcaatgaatgagatgcattgggaatttgattggaacattgatgaacctagcatctccagtccagagtcctcttatagtaatcacgtagccgactctacaccgttgagtcggtgtaatttagtctagatgatgccgagttagagattactcgccagagtgatatggttggatatgagcaagctacagaggcgccttgtgcattacttcctcaagatgctaccatgagtgttatcgcacgtccaccagctgttcctctgtcgtcctgccggcatccgctatctcctcttccttcctatggcttccatgttgtcaactgttgcaactttcagcattactctcttgtnnnnnnnnnnnnnnnnnnnatccataacatccagtgaatgatgacattgtttcagttttcaacgaggggacagggcgaaaactgttgacataatgtgagtgggactcagcgaaaacctgttacgattggaatattttcacttgcaacaagtacaaacatgtaagatgtaactcaccaatgaataaacaacctgagcttttctttcctcctgttacagttacagaagtcaatgtacagccatctcacaaaaatacagaagtcgatatacagctagaagaaaataaaaacgtccagtatgttatttcagttcacagtacaagcaaccctaggttaggtagtggtcttcagatggcgatgaccctacacttctccagcgggaagtcatgctccatcagcgcggcccgtcgacgaggtcagtgtgggaattgccccaccatctacatcacgatctcccaaatacccacgcatgtaccttgtgtctctctgtaatcaatcaagggattcacatcaatcaatgaaagcatttcaaaactttacagtatagatgaagctaagcaaagccttgaacaatttcggttccatgtccttgatctgtatgacacatactggacgtaggtgtaccgtgtacccttctccatgggagcaaagagccgagccatgaagaatttagatcgggctgcaagcacacatcggtgtgcggcgaacttgtcgtcaccgaccgtgcatgtaacatcagcacccacttcggtttggaaaagatagttaaaacggctcacgtcatgcaggcgcaccttggtgccagcggcatcgtgttgcagaaaaaatgtcacaccggagagaccgaagctactgtccgaaccaggacttgagagtttnnnnnnnnnnnnnnnnnnnnnnnnnnnnnnnnnnnnnnnnnnnnnnnnnnnnnnnnnnnnnnnnnnnnnnnnnnnnnnnnnnnnnnnnnnnnnnnnnnnnnnnnnnnnnnnnnnnnnnnnnnnnnnnnnnnnnnnnnnnnnnnnnnnnnnnnnnnngccttctaactgaatccccaactctaccatctcatgtgttctagaagtatctatccacatgcttatctgatactgtattaaaaaaaagactcaaacaatctgactagagaggtaagaaccaaattaaatcttgtacaatgcgattctagaaaaggaaatatatatatatattccaatgtatttttcaatacttnnnnnnnnnnnnnnnnnnnnnnnnnnnnnnnnnnnnnnnnnnnttaaatgacgtgcaaagcacatacaatttactagtagcttaggcaaatatatcagagtggcgcagcggaagcatggtgggcccataacctttgtcccaagaccgaaacttggctctgataaatttgtttttttgtcacaactatctcctgtgataaatttgatttatcctttttatcatcctgtcaccccggggagttcgccactgtccatgttagctgccttcgattgaatccaaagttggcaataatgtaatcaagaattcaaaaagatggacaaatttggtattttacacagcatattttccttcaaaacggatgctcatctggatcatgtctactgcagggcctagcctcactatgcggagaagttacgaatacatttaactgattctgtaggtcaacaacatgaagaatgagctgattctgcctcaacactttccgacttactgagatgttcctctacgccatcggatgacaagctcaagttctgttggtacagacagtgacaaactgaatagtgctatctgtcagctttgcaacgggagtgacattttcatgaatcacaaaacagataggtgtcacacgtaaggaaatgataaacccgaacctttcgcgtcaactacatagcagtatatacagttaaaactcggtgtgcatcacctaaaaaacgaggtttcgtgcgtactatagcagctaaaacgtagtaaggcagcatggcagagcttcatagcccatcaagagctgcaaatcctcaagatttcctctcagagaaataaaacctcttgccttaaaactatctcttcttaaattcaaaatacaacgtaccttttgaaatagtattacaggttttcagcaagttgcatccggcaagagcatttgccgtgcaaaattttcaaaaatcaacaaaatatcatttgcggttgtaattataccaagaatcgcactgccgtcacatggcactatctcagcaggttcagaactttcaacgttgggacatgtgtgcattgtatccatgttcattgttgttccacttcgcaatcgttgctttgtccttgtttgttgcaatattagtttttggttgcttaaactgtagataggggcaccacaaagcgtcaacaattcttcaacaaattacaccgtcagagaataaatgtcataaggggttgaaacaaatggccacaacaactgtcatgtgaagtttggtgaacgaatgatgtctaggccacacaccatgtccattcgccggccttctataagtaactaccttacttgtgtagaagaatcacgtttaattgctggagggagaaagtatacccaagtgtgtgaggagaactacactgatgagcatgatgagtgtcaccagtcagatggtgtaatttctaggggaatgagaggcattgggaattcgattggaactttaaaaacgtgatcatcttctggatttacagtaagcagatagccgaccgtaccctactgagttggtgcaatttagagaatatgacaagagtgatacaatttgtagttttttgttaaaatcccctagagaaaattcaagtcgaaggcttgagacatttaaggatttacatgcatgctatctcagatttggatcaaacttcggaaactcacatggaaagcaagcaatctttgtattcaagctgtctttgcgtattggcagactagaatcataagcacgcagacatctagtgttttacaactagctgacacaccttatctcttttggcagcacaacatggtcatttttggcagaacagtttgttcaaatttacaataactactagtgttctctgttactgcaagctaccagcagcaatatgaggccatgtttctttaagaaatatcacttgatgagatttgccgtgtttcttcaatggatcttcaaacaaggcaagtgtggcagctctattatggtaattgtgttcctactaacagtaacagaggagctgcaagaaagtaatgaaaacataaagctttcaactgaatcaaaagtttcaaattgaccggtttccttctcctaccgtgagaacagaggagattacctcccatcgctgtttgtctgtctgtcgttgatatccaaataacaaatagctgagactcgtttgaattacattnnnnnnnnnnnnnnnnnnnnnnnnnnnnnnnnnnnnnnnnnnnnnnnnnnnnnnnnnnnnnnnnnnnnnnnnnnnnnnnnnnnnnattttccaacttttttttatcataattatttctctctgagaattttgatttgtcgtttttgctcaggtcccaattactaagcctgtcacttcgattagtttgccactgccatgtttgcttatatattgaattcaaagattgacaaattcgagatttcacactgcatacattcatttaaattcaaccagagtggttaaaactgatgttgtgtgaaaacttcggtgatggtgctaaggatgcttggactgatttaactgggactgctgcaggtcaacaacatgtagtagaatgaactgattctacgccaatgcttttcaaaagtcaagaaaatatcatttgtgattacagttatagcaagaaacacactgtcatcacacgacattatcagcaggttcagacctttgaacgttggtgcatgtgtaaactatagccattcattgtttttccacttcacaatcgtcgatttgtccctgtttgttgcagtattcagttttgggttgcttaattgtgggtggacaccagaaagcgtcaacagttcttcaacaattacatcaccttctgtcggagaataaaggtcacgaggggaagaaataaattgccataacagctgtcatgtgaagtttggtgaaggaattatgtctggaccacacaccatgtccattccttaaccttctataaataactaccttacatgaatagcagaatcatgtttagttgctagagggagaatggatgatcaaatgtgtgaggagagcaacaataatgagcatgatgaatgtcactagaccagtggtagtggccaatgcaatttcctggggagtaagatgcattgggaatttgattggaacgttaatgaggaaatcttctctggagtcctcttctggatttaccatctggacatagcctactttacactgttgagttggtgcaatttagtatagataatgtctgagtttgagattagagactagagtgatagtctgatataattgaacttgataagtcatagtggcgttttgggcattacatgctcaagatgcttaccaggagtgctataccatctccacccgttgtttctcaatcgtctcctagtgcttctccgacaaaggccaatgatctatacatgcagtgatggttttgatactccattcagtatgaaagaagatgcgtgtgtgtcaaccaagagtttggtaacgcaggaagacttgtgcatacatcatctatacatgcagtgatggttttgatactccatgtacaaaacaggagcatgttagatttttttagagaaggagcatgttagtttgcggagatgattactaatgatttgttgtagttctcatatgactgtcttggcaactcatgtcttgcagtagcggtgccagtaatccaattatgtgtggtcaagtgaatgttgtgtagtcagatatatgcattcacaaggatttttgaaatgatttctacttgatgtatatatgctgtttttgcaaaaacctgtgtagtcatttcactacccagctcaagtgtgccttcgccactgatgtctcgcaagtcatattcagtccggtgacttattcaatgcactgaaaatagggagcctggtgcaagtagctcccgcttgtgcaggatccgaggaagaatcgaaccactttgggtaatttgtacgctgtctttccctacatttctgcaagtgattgttttcaggactcaaacccgttactgttgcgccaaggctcccttattcaatgcatttgcttcttaaaacgtttaacaagaattacctgtcatttattagaatcaaaggctatatattaagtactctctgtttccatttaattcttggggttgccgaagtcttcggcctcctgcatccaccggtagcgcacagtgagcatagcttgatgccgcctctaggcctccaactcgctggagcaaaaaaaaaaagaattctaggagcttgtagaagcagcggtcggaaagtcatcgatgcagaccaggagacgactaaggccgtgatccatgaagtaaatcgccgccacggaaaaaccgccattgataaaggcctgtaaactccaaagacaacgaagatcacgaaagccaacggaatccagacgggtctaccgaaaacctaaaccgaccagatcccgaaagattatcctaagatacaactccacacaccttccaggatcatagtcgtgccacaaaaacacgccagccaacacccaccaccagttacgagctgccgttgcaccgcagcagttgctgcgccacctaaggctttgttcggttgcctcatggtagattccacgtgtggtttctaacctcccagggatttgatgatccccgtcttgtcacccgacccccaccattccccgtccatatgaaatccctgtgtgcataacctgttcggttggttgctcccctgctaatccatacacaaagacaacactgttccatagaattaaaagaccacacagcctacatgcttttttgcagtaagaaaatattacagaaaataagagaagaaactgtacaagatatacggatgttacataatttatttatctgaaataaacagtaaaaccgatgaagatataatacagatgttacataatttatctcaaatagacagcaaaataattcaaaaaatctcagttgtcccaaactggaattggtcacttccagaatatggtttagcatctctggaaaatcatgcaagatataatacagatgttacataatttatctcgccgatgtcgcttccgtagcgatcgatacactgcattggcaatgaaggcagttagttcatataaaaggactaatatgagagcagtatacatgaacaaagaaataaatatgagatgtcttacttttggcatcaacaatcaagtgagcaaagaaatactaacaagatatatattgaccagctagcaaagaaagatcaaatggacagcaacatcgtatccatatgcaccaaacagatcacaactatatggtaaaaacttaaaacacatggattgatccaggcacataaaattggagtctttgctaagttatcaaagcaacagcacgatgagaggcatcaaaaaccatagttaaaaggaacaactgttaacaagttgcagtagttatagaactttgtttttattatcatcagcaaccagaataagaaatggacgttttgatgtgagctagttgaaccatcagcttcaggttactagatgaacaaggcaggttcatgtgatctagatgaacatgcgagtcccagtaggggtaccaagaaaaccaaggttgtacatcaaaactacatgctagcaacgtgcatattaaatagaagcagaatttgagtacctgagttattccatttcannnnnnnnnnnnnnnnnnnnnnnnnnnnnnnnnnnnnnnnnnnnnnnnnnnnnnnnnnnnnnnnnnnnnnnnnnnnnnnnnnnnnnnnnnnnnnnnnnnnnnnnnnnnnnnnnnnnnnnnnnnnnnnnnnnnnnnnnnnnnnnnnnnnnnnnnnnnnnnnnnnnnnnnnnnnnnnnnnnnnnnnnnnnnnnnnnnnnnnnnnnnnnnnnnnnnnnnnnnnnnnnnnnnnnnnnnnnnnnnnnnnnnnnnnnnnnnnnnnnnnnnnnnnnnnnnnnnncatttcttgagggtacagtagccaaatctggttgagtttgctggggctccacagcaatgttttcttgcacatacacctcctcaacatcttcatcaatctgcaccctttctcctccaagattctcaccatcagctgatgtttctccttgattctcgccagctcctccaagattctcgagatgtgattgggttgagcaatgtgnnnnnnnnnnnnnnnnnnnnnnnnnnnnnnnnnnnnnnnnnnnnnnnnnnngtcaaaatgacaatcaagtataagatttcaaactagaagagtaaacaaacataaaacaatgacatgagtatataatgaagttgacnnnnnnnnnnnnnnnnnnnnnnnnnnnnnnnnnnnnnnnnnnnnnnnnnnnnnnnnnnnnnnnnnnnnnnnnnnnnnnnnnnnnnnnnnnnnnnnnnnnnnnnnnnnnnnnnnnnnnnnnnnnnnnnnnnnnnnnnnnnnnnnnnnnnnnnnnnnnnnnnnnnnnnnnnnnnnnnnnnnnnnnnnnnnnnnnnnnnnnnnnnnnnnnnnnnnnnnnnnnnnnnnnnnnnnnnnnnnnnnnnnnnnnnnnnnnnnnnnnnnnnnnnnnnnnnnnnnnnnnnnnnnnnnnnnnnnnnnnnnnnnnnnnnnnnnnnnnnnnnnnnnnnnnnnnnnnnnnnnnnnnnnnnnnnnnnnnnnnnnnnnnnnnnnnnnnnnnnnnnnnnnnnnnnnnnnnnnnnnnnnnnnnnnnnnnnnnnnnnnnnnnnnnnnnnnnnnnnnnnnnnnnnnnnnnnnnnnnnngtcttctgcatttccacattgcatgttaatgtacctttttctatcttaactattttggtttcaagaaaataaagtcccgactagagaaataaagtcacggctagtttattacctttgggagaccctctcctcctctttgtcacactgcctgtaggaggtgatgctctatccctttcgacagcttttttgaggaggctcaaccttggtgaccctcgagcagtcatcatagtgacttctgaacaatattcatgacatgaacaacagaaaaaaacataaacttnnnnnnnnnnnnnnnnnnnnnnnnnnnnnnaatgacaagttatgcatgttgnnnnnnnnnnnnnnnnnnnnnnnnnnnnnnnnnnnnnnnnnnnnnnnnnnnnnnnnnnnnnnnnnnnnnnnnnnnnnnnnnnnnnnnnnnnnnnnnnnnnnnnnnnnnnnnnnnnnnnnnnnnnnnnnnnnnnnnnnnnnnnnnnnnnnnnnnnnnnnnnnnnnnnnnnnnnnnnnnnnnnnnnnnnnnnnnnnnnnnnnnnnnnnnnnnnnnnnnnnnnnnnnnnnnnnnnnnnnnnnnnnnnnnnnnnnnnnnnnnnnnnnnnnnnnnnnnnnnnnnnnnnnnnnnnnnnnnnnnnnnnnnnnnnnnnnnnnnnnnnnnnnnnnnnnnnnnnnnnnnnnnnnnnnnnnnnnnnnnnnnnnnnnnnnnnnnnnnnnnnnnnnnnnnnnnnnnnnnnnnnnnnnnnnnnnnnnnnnnnnnnnnnnnnnnnnnnnnnnnnnnnnnnnnnnnnnnnnnnnnnnnnnnnnnnnnnnnnnnnnnnnnnnnnnnnnnnnnnnnnnnnnnnnnnnnnnnnnnnnnnnnnnnnnnnnnnnnnnnnnnnnnnnnnnnnnnnnnnnnnnnnnnnnnnnnnnnnnnnnnnnnnnnnnnnnnnnnnnnnnnnnnnnnnnnnnnnnnnnnnnnnnnnnnnnnnnnnnnnnnnnnnnnnnnnnnnnnnnnnnnnnnnnnnnnnnnnnnnnnnnnnnnnnnnnnnnnnnnnnnnnnnnnnnnnnnnnnnnnnnnnnnnnnnnnnnnnnnnnnnnnnnnnnnnnnnnnnnnnnnnnnnnnnnnnnnnnnnnnnnnnnnnnnnnnnnnnnnnnnnnnnnnnnnnnnnnnnnnnnnnnnnnnnnnnnnnnnnnnnnnnnnnnnnnnnnnnnnnnnnnnnnnnnnnnnnnnnnnnnnnnnnnnnnnnnnnnnnnnnnnnnnnnnnnnnnnnnnnnnnnnnnnnnnnnnnnnnnnnnnnnnnnnnnnnnnnnnnnnnnnnnnnnnnnnnnnnnnnnnnnnnnnnnnnnnnnnnnnnnnnnnnnnnnnnnnnnnnnnnnnnnnnnnnnnnnnnnnnnnnnnnnnnnnnnnnnnnnnnnnnnnnnnnnnnnnnnnnnnnnnnnnnnnnnnnnnnnnnnnnnnnnnnnnnnnnnnnnnnnnnnnnnnnnnnnnnnnnnnnnnnnnnnnnnnnnnnnnnnnnnnnnnnnnnnnnnnnnnnnnnnnnnnnnnnnnnnnnnnnnnnnnnnnnnnnnnnnnnnnnnnnnnnnnnnnnnnnnnnnnnnnnnnnnnnnnnnnnnnnnnnnnnnnnnnnnnaaaatgccgctagttattactactacacctaaacagtaagagtgcaagttgtacaaacaaacagttcatatgtccggcatcggaacatcatctaacagaaaggacaacagtggaaaaaaggacaactgcaatgtctagtaatgtcaataggaaggaggtagcacttcagctcaaattcttcaacaactacaacgtctagtaatgtcagatattaacatagctctcagcttaccaaaaaaacagtttgtaacacagatctattgaccaagcaataataatcaacagtaatatgaataaggagaagattaaaataacaggattaatctaccttgtccttcacgatgctgcccaattcagggtcttgctgcagctgaggtgacgaagctagcctatagaaaatggagacaaaatacggatttagctatattctcattatgtacacaaactgcactatgtatatttagataatcaagaacaagaatcaagaacagatgatgattacacaccatgaagcattaacatgatgacattttaaagcatcttaggcataaggttttctaattaacatgatagactgggaataccaattcaacatactatgtctacgacggaaaggggttaacaaatcaccttctttataagtagattacattatataaagaagcagcatgtcagctcgattagaaacccaggtaacttgtttacaactaacgtgagtaaagtgatacaagtctgaatatgtaaactttgtatgaatatgtaacatgaaacattaatttaggctattagtagatgcaacattaatttattaatacttggtagctgagtttaagtctcagtattattaagtcatcatacctgactctaatttttttgagaaacaaaatatcataatcacaatttgacagattatgatatgtgaattgagatctagcacatttaatatatagcaaaacatcacaatatccgaaagtggctgacatattccttagcttctccatgcacttgcaaagaaattttgccaacacatccagatcattatgtcacttgactgatcagccatcgagtaagtctaactctagattctttgctaacaaattaatttcacactcctttcttaagattgtgtgaacagatcattagtcttaatcagaacttcagaaatgatacaagaacaacaacattaagggcgaaaatgcaccgccagtaaattggaactataccaccttattttaaaatgttagttatcttactgactactgacctatctttgtaacagtgaactatgctcaacaaccaatacatacatgggggtaacgggataagaaatcaactgaggaaatttatatttctaaaatgctgatagaagaaagcaagtgcagcatatttaagaagggacaatacatgacaaattcttgaccttaatttatgatggagtagtgagtcagtgaaacagactgttaaaaaactaaagagggatacatcctacatattcacttgttcgtcgaagcgattaacaatgcattttttccggtcaaataatacatggtatatcggcatgaagagaacaacttatatactctgccaatgatcatactagaagtatcttatgttcagaaagaagaatacactatttgaaaattaatttgcatgttgcagtttgaacagactaaaatgttgacaactgcaagaatgaacaacagcatataagatcttagctgatgaatgagtaaaacacatttcttagccaatgcaactacacatacttctcagtaattaactgaaccaaaaaacatatgaatgagtaattaacttatcagcataggtaacctagctgaccctcctttctcatttcaatattcagtgacaacacccagcaagcaaccactgcattgcctatctaaataacaattgatgctagttcctaggaaaccccaagaaagtctgaccttgacatttgggaagacagatccgactaggttttcatggagggggcgaatcagtgctgctnnnnnnnnnnnnnnnnnnnnnnnnnnnnnnnnnnnnnnnactaaccagagatctcgtcgcctgcagcaaccacttctccagagctagggttccggccgcggcaagggggcggcgggggcgatgggacaatcggaggttagggttcaggcagggcttcgtggcaggtcgtcgaaccagggggacgccctcctctccgcgtaggttgnnnnnnnnnnnnnnnnnnnnnnnnnnnnnnnnnnnnnnnnnnnnnnnnnnnnnttccgcttctgtcgcctcgctcgggagagacgaaacgagcgcctcgctcggggattgcttccacggggtgccaggagatgtttttttccgcgtgggtttggaggggtttgggccggggaaataccacacggggcttaaccgaatggaaaaaactggttgggtcgggtttattccccgacgggggaaatccctgctgacccgcgggattagacccaaaacctcgcggggctgagatccaagctgtgaataaaaatccattaatgtgagaacaaaggatctgacaaggtttctttttcatattctccagtaacaacattaaaaagagatagaaccagttatgttgatgtatatatctagcaattaaaatcatttttatagttactgtaagaaggaaccaaatttggaaagaggttagtacttgcagagtaagttttgtactgcataccaaacatgccattctcaaaaagtaaacagaaaaccgaatcccataggcttgacaaccgccatctccgttgaatttgatctcaaccaagccgtacaacaccaacctaagtaagagatcatattagaataaaatagcaaacattcagaaaaacctaccacatagcacagaaaattatgtgcagaattatgggacaaataatactcactgatgcttaaaacaactatatatccactcacatgattagcacttgagtatagtatcatagaagttaatatgatgttcagtacaatatcataaaaaaagagacctacacaaccttttgcatggatgtgcttacacaagataatgtgaaacgaaggcatgtgagaaaaccaaagtcaggactctagatatgactggatcctgagcagcatcaacacaccacatagcatacataatcagtctatgaacttcccatgcacaaaattgcccaagcagagcacacaacagctatagggcataggcacacaacagagaaacatcagtatacaacaacataaaattgctctaaaattgaacccccacttcccctaaaccataatagaaaatcttaatggcttcagtggcctcccataccactctgacgaagcaggaaacacaaccaggatgggagtagacagcgcacctgagtgacgtccaccgcttcgatatcatccacgtactcctctgggatctggacggcgccaggtgccgcgaccttaggagaggaggccgtgggaaggggtcgacgtacttggtcggcgcatcgagcagctccatcacggcgccgaggagtggaaaacaccctgaaatcataacatgcctcttatatcattttcgagattgatttcccccctaatatatctgtgaaagtgagcatcatatgtgcaatgagaagagctggagttgcgattgaggaaaataaaacaatttttgtggcaccacaaaaatgcagtgatctgatctctccgacatcgaatacgggcgtgcggcactcatcagatgtttgatttactccctaacggccccttgcctcctccacggtgctcggcagagcgagcaaatatggcactgcagattttcaagttaccatggccatgagaaagagacatacatatgtggttgaataatacaaaataacaaacaacattgccattgggactgagccgacgtactgctgctactcctcaccatgatacgcacaaggcagtcagccctagcatgcacgctaataaaaggaaaagaaacagtaacatcattgccccccatttataagttgcttcctctaaattcctatctatcagctgacaataacctgaaagaataccaggcacatgaaccttacatgtaagcacaaaacacgagcatgcaacaattttttaagataaagggtgaaaacagatgtgcatcaattaccaggtcatttaagttaaaataaccattagccaaacaatgaagttcactatatggaaaccatttaactttagacattgctacctttcaactggaaaataccacatctgtgtatgcagttgcatggcactaacaaaacttccagtactataagaaaagatctggctattttaattacctccatggttattgaacaagagcaagattgacttgatttgcacacaagcacttacagctgcgcnnnnnnnnnnnnnnnnnnnnnnnnnnggcacaactcggtcgggtccttgtcgggagcggtggtcggagaagctgcaggaggccgaggcaccggatcgacgaccagtagtccgccggccatgacggtcctcgtcggcatcggcgagggagtaggggaggaggaggccgaccgcccacgccgcgtcccatacgccaccgccttttcctcgcctcgccattcctccttccctcccgtgggagccggagccagggccgggcgttagggtttgggaggcgccagatgaggggtggaaggaggaggccgtgaggggaggaagccgggcggcggcggggcagggaggggagaggaggcggcggcgaggcgggaggagcggggcgcaagggaggagaggaggcggcgacgaggcgggaggagcggggcgcgggggatgagagaaggcggcggcgaggcgggatgagcgggcgcaggggaggagaggaggcggcgacgagtgcggggggaggagacggctaggtcacccacggcagcgccccctttttatacccctgtatgcagaatgaccaaaataccccggtgggggcacggtatttatattttgctgccattactattcattccagcagtgttcatctcagatccaacggcccgggttcatccagatcttgatccgatgcccataaacgcatcaagcaaaccgatccgatggccgagagtcgctgatctctaaggagccatgtatgagctttcatctcttatttcttgatacatgcagtgatggtttcgatactccatgtacaaaacaggagcatgttagattttttttaaagaaggagcatgttagtttgcggagatgattactaatgatttgttgtagttctcatatgactgtcttcgcaactcatgtcttgcagtagcggtgccagtaatccaattatgtgtggtcaagtgaatgttgtgtattcagatatatgcattcataaggatttttgaaatgatttctacttaatgtatatatgatgtttttgcaaaaacctgtgtagtcatttcactacccagctcaagtgtgccttcgccactgatgtctcgcaagtcatattcagtccggtgacttattcaatgcactaaaaatagggagcctggtgcaagtagcttccgcttgtgcaggatccgaggaagaatcgaatcactttgggtaatttgtacgctgtctttccctacatttctgcaagtgattgttttcaggactcaaacccgttactgttgcgccaaggctcccttattcaatgcatttgcttcttaaaacgtttaacaagaattacctgtcatttattagaatcaaaggctatatattaagtaatctctgcttgcatttagatcttggtgttgccgaagtcttcggcctcctgcatccaccggtagcgcacagtgagcatagctcgatgccgcctctaggcctccaactcgctggagcaaaaaaaaaaagaattctaggagcttgtagaagcagcggccggaaagtcatcgatgcagaccaggagacgactaaggccgtgatccgtgaagtaaattgccgccacggaaaaaccgtcattgataaaggcctgtaaactccaaagacaacgaagatcacgaaagccaacggaatccaaacgggtctaccgaaaccctaaaccggccagatcccgaaagattatcctaagatacaactccacacgccttccaggatcatagtcgtgtcacaaaaacacgcaagccaacacccaccaccagttacgagctgtcgttgcaccacagcagttgccgcgccacctaaccggtgacatgtgccattccttttgcgtcacgagctccctgcagaatgaatcgactcgaagcgactaccagccccctcggcaatccctcgctcccttgaacccctagcacgcagaggcaagtccagagcaaaaaaaaccatcttggtcgacggtaacgtacctcaaagcttcatgcaatggcaccataggaatgtcgaatacgggtgctggcaagcaacagtgagtgaatcgctggagagggatgaactccgccaagcgggaaatgagacatggggagccgagtgacgaaaataccctgctaatacaactagcccaccnnnnnnnnnnnnnnnnnnnnnnnnnnnnnnnnnnnnnnnnnnnnnnnnnnnnnnnnnnnnnnnnnnnnnnnnnnnnnnnnnnnnnnnnnnnnnnnnnnnnnnnnnnnnnnnnnnnnnnnnnnnnnnnnnnnnnnnnnnnnnnnnnnnnnnnnnnnnnnnnnnnnnnnnnnnnnnnnnnnnnnnnnnnnnnnnnnnnnnnnnnnnnnnnnnnnnnnnnnnnnnnnnnnnnnnnnnnnnnnnnnnnnnnnnnnnnnnnnnnnnnnnnnnnnnnnnnnnnnnnnnnnnnnnnnnnnnnnnnnnnnnnnnnnnnnnnnnnnnnnnnnnnnnnnnnnnnnnnnnnnnnnnnnnnnnnnnnnnnnnnnnnnnnnnnnnnnnnnnnnnnnnnnnnnnnnnnnnnnnnnnnnnnnnnnnnnnnnnnnnnnnnnnnnnnnnnnnnnnnnnnnnnnnnnnnnnnnnnnnnnnnnnnnnnnnnnnnnnnnnnnnnnnnnnnnnnnnnnnnnnnnnnnnnnnnnnnnnnnnnnnnnnnnnnnnnnnnnnnnnnnnnnnnnnnnnnnnnnnnnnnnnnnnnnnnnnnnnnnnnnnnnnnnnnnnnnnnnnnnnnnnnnnnnnnnnnnnnnnnnnnnnnnnnnnnnnnnnnnnnnnnnnnnnnnnnnnnnnnnnnnnnnnnnnnnnnnnnnnnnnnnnnnnnnnnnnnnnnnnnnnnnnnnnnnnnnnnnnnnnnnnnnnnnnnnnnnnnnnnnnnnnnnnnnnnnnnnnnnnnnnnnnnnnnnnnnnnnnnnnnnnnnnnnnnnnnnnnnnnnnnnnnnnnnnnnnnnnnnnnnnnnnnnnnnnnnnnnnnnnnnnnnnnnnnnnnnnnnnnnnnnnnnnnnnnnnnnnnnnnnnnnnnnnnnnnnnnnnnnnnnnnnnnnnnnnnnnnnnnnnnnnnnnnnnnnnnnnnnnnnnnnnnnnnnnnnnnnnnnnnnnnnnnnnnnnnnnnnnnnnnnnnnnnnnnnnnnnnnnnnnnnnnnnnnnnnnnnnnnnnnnnnnnnnnnnnnnnnnnnnnnnnnnnnnnnnnnnnnnnnnnnnnnnnnnnnnnnnnnnnnnnnnnnnnnnnnnnnnnnnnnnnnnnnnnnnnnnnnnnnnnnnnnnnnnnnnnnnnnnnnnnnnnnnnnnnnnnnnnnnnnnnnnnnnnnnnnnnnnnnnnnnnnnnnnnnnnnnnnnnnnnnnnnnnnnnnnnnnnnnnnnnnnnnnnnnnnnnnnnnnnnnnnnnnnnnnnnnnnnnnnnnnnnnnnnnnnnnnnnnnnnnnnnnnnnnnnnnnnnnnnnnnnnnnnnnnnnnnnnnnnnnnnnnnnnnnnnnnnnnnnnnnnnnnnnnnnnnnnnnnnnnnnnnnnnnnnnnnnnnnnnnnnnnnnnnnnnnnnnnnnnnnnnnnnnnnnnnnnnnnnnnnnnnnnnnnnnnnnnnnnnnnnnnnnnnnnnnnnnnnnnnnnnnnnnnnnnnnnnnnnnnnnnnnnnnnnnnnnnnnnnnnnnnnnnnnnnnnnnnnnnnnnnnnnnnnnnnnnnnnnnnnnnnnnnnnnnnnnnnnnnnnnnnnnnnnnnnnnnnnnnnnnnnnnnnnnnnnnnnnnnnnnnnnnnnnnnnnnnnnnnnnnnnnnnnnnnnnnnnnnnnnnnnnnnnnnnnnnnnaacagaatattcaggcttaggaactaaattaacatataagatggtatgaggttagcaacaaacattacatataacaagaactgccttgctactgttttcnnnnnnnnnnnnnnnnnnnnnnnnnnnnnnnnnnnnnnnnnnnnnnnnnnnnnnnnnnnnnnnnnnnnnnnnnnnnnnnnnnnnnnnnnnnnnnnntgtgttatgccatctaacttaaactgaaccacaagatatctcaacacaagccaaactgaatatattcaggtttatatgtgatactaacagtaggatctagatatgctggaattaacccaatcaaaaaacaatggtacaccaacttcactatagcatcaaaacacacctactgtgaggaacacaaaaacctcaactaaagcagagcatcggtatgctagctataatccctaaaaacatggatcggttaacaagctagcatcagcactaattaaacaagatcatcatgggtttgaggagcggggctctcaacgtggggttggggggggcaacaaggggctctcaacgtctctctcgtcaccgcactccacggtcgtcgtcgtcacggcggccagcaacggtgccggcaactcctacgtgcaattcaccccggccagcgcatccccctccacggccccatcatcggagtnnnnnnnnnnnnnnnnnnnnnnnnnnnnnnnnnnnnnnnnnnnnnnnnnnnnnnnnnnnnnnnnnnnnnnnnnnnnnnnnnnnnnnnnnnnnnnnnnnnnnnnnnnnnnnnnnnnnnnnnnnnnnnnnnnnnnnnnnnnnnnnnnnnnnnnnnnnnnnnnnnnnnnnnnnnnnnnnnnnnnnnnnnnnnnnnnnnnnnnnnnnnnnnnnnnnnnnnnnnnnnnnnnnnnnnnnnnnnnnnnnnnnnnnnnnnnnnnnnnnnnnnnnnnnnnnnnnnnnnnnnnnnnnnnnnnnnnnnnnnnnnnnnnnnnnnnnnnnnnnnnnnnnnnnnnnnnnnnnnnnnnnnnnnnnnnnnnnnnnnnnnnnnnnnnnnnnnnnnnnnnnnnnnnnnnnnnnnnnnnnnnnnnnnnnnnnnnnnnnnnnnnnnnnnnnnnnnnnnnnnnnnnnnnnnnnnnnnnnnnnnnnnnnnnnnnnnnnnnnnnnnnnnnnnnnnnnnnnnnnnnnnnnnnnncccctacaacggttgtgtggttgctgtctgagagcaattaattgatgtcgatgatgtggcagcacacccaacgcagagatttgcgcagcagatccgttgactcacgttctgtcgcgcatgtgaaatgttcctggcgaacttttttttgcgggggttcctggagattgttagctcaataatatttctggaaaaaggatatatttcttatttggggttaaatggattttcttggacgtcgataagtgccacacgtgtgggcgttagggagtccgcccacacattttgtgtggtgtataagaggaacagcccacacacctacgtgtgggcaaaacaagtaatgcccacacacctttttttcccttccgatccctctcacatgcgtgtgtgtgggcgaatttgataacgcccacacgcccgtatgtctggcctcgtaccctcctggtcccgcatgccacgcgtgacggtcaccgcgcgcccgcagttgccatggtccagaccctcgtnnnnnnnnnnnnnnnnnnnnnnnnnnnnnnnnnnnnnnnnnnnnnnnnnnnnnnnnnnnnnnnnnngccatggttgctcaactgcagttgccatgtatggtctgatctaacgtagttgccatgatttcataaatttaggagttgccacacactaacactaggcagttgaagttgccatgtgctcacaagcatgctagggcagttgccatgtaaaaaggaagagttgcactcacgaacggacgtgaatccacnnnnnnnnnnnnnnnnnnnnnnnnnnnnnnnnnnnnnnnnnnnnnnnnngattttctttgtggatggtaattactaagctcgttgatcagtacctaatctaaccgtgcagattgcacgcatggtatggtaacaattgttatgtatgtttttccttgagttggaccatatcatatctcgccatggttatttttagttgctaaccacacataccacctggtaacaaatctagaagactaatggccattaaatacataaaatctggtaattatgcgcattccaaaccaggagcactatctcccataatgcacatgcgcacaacacaggaaatatctcacccttgatgcgtgtatatatggtacagtaactaatattctcaatccaatcgcatatcttactactataactctatgatctgcaaaccgtatcacaggtccgtggtcctagcttgtgtatataaggattctgccgatatgaatatatcctctcatcaatcaatcacagcgcatatctatgtacctgatagttattttgtactgcaccctctatatatactgagacaagagggggtcgtggccattgcctcagatctctaactgtgtcgcaatctcgtcaacaccatgaaggggggcagcatggtgtatacaattgcacttttgttcatcgggtgcctagtcatggttggacaatgtaagcgcatcttctctatcatattgtttatatccttgcagccagcccactatatttcaaaagtattgttccttctatctacataagataagatacttgcctattgtgcatggataaccatataatttgtcatatgtaataggtcgtcctgagccagagagcacatacgaagatggccatcgcaacgtggctacggtggtctcatcattagatgacaacaaacttaccttgcaatggtgtgtcgcaagggattgtgtgaccaaaggtgaaccgcatgccaatcattgcttttgctgcctcaatgcgccgggagcaccttgttttaattccagactggattgtcagagtcaatgcccaagtatgccaccaggaaaataagggtgtgcatagtaggaaataggtttaagttgtcattatctttgcaacttgagtcatgggcgagtattaaattatcttgagaattaaacattttgtttgatgattacgagagtggttatacctcaagaccaccttttatgtggcttattgaaagtgaaatattcttctttcagcccgaaaaatgtgtatgtgagcgttgcgtgaatctatgcatataagttcttctatgttatattttgtgcatccaaaaaaatgaaccacgagaaaataaaaggtgatcttcgcgctttcgagcaacctacccgcattctagtccaggtcaagtgggcagactaacctattttgttggaagagcataaaagatggtccatcaaggcagcaactatagtatagtgaaaaaaaaaatcacttgtacagatatttatcatgacatcgttcgaagagtaacaaaaatcaaattatccataccaagcatctcagatctcgctatggtcctcactttgtcctcaattccgcatctccatataggagagtaacctgtacagaaagagaagatcggctagggaaccaaatttcagccaatgcaaaaaatcaaatggaaaaggaacttgaaatttacaagattatttagaaagcgatgatagctgcttctttctagacgcgagtacttagcagtgtgttgaaggaagaaatgagaaatcgatagggttgtgagatgaagaaattaaggatgaataactacaaaggcaagatccattaattttttaggtgcttcgagagaggagtggaattaacaacgaggagaagagggaatataaaattggtgactgtggcatgcgtccttggttaatcaatcattagaacttgaagctggctgcccccagccctaacattcgggagcaactaattaaggagtacccttggagggctcccgcaaaggtcccattttgggcctcggagtgcgccaagtggtgcgcctggccaccatcaggttttgcgggctaggcgcaccctcaggatatcggcttttcattcctgcactgtgtatgtatcaaggtttttaatttcagaaccaaaataatttcggaccttaacgaaatatatgaaatttcatatannnnnnnnnnnnnnnnnnnnnnnnnnnnnnnnnnnnnnnnnnnnnnnnnnnnnnnnnnnnnnnnnnnnnnnnnnnnnnnnnnnnnnnnnnnnnnnnnnnnnnnnnnnnnnnnnnnnnnnnnnnnnnnnnnnnnnnnnnnnnnnnnnnnnnnnnnnnnnnnnnnnnnnnnnnnnnnnnnnnnnnnnnnnnnnnnnnnnnnctttgaacatccagtaatgcaattatgacaactttaatatggtaattatgatcctactggccagacaaagttacattccaaaaagagaagggagaaacagaggagctacaaatcagtaacaaaaacacaactgtgtcagctaaaccaaaagttgcaaattcatcttgcacttcctggttccttcacccnnnnnnnnnnnnnnnnnnnnnnnnnnnnnnnnnnnnnnnnnnnnnnnnnnnnnnnnnnnnnnnnnnnnnnnnnnnnnnnnnnnnnnnnnnnnnnnnnnnnnnttgctcaacagttaaactagtcctcgagtaaaatttgttctcctagcatgctttttgtttttagatcaaattgttcgtctgcaagaaaattaaactgcttatccacaaaaaactgagtcgagtagtcgccttcggtcggcagacagacacaaataatcttagaactaccctaaaagaaattcttagagctgaagcaagaaaagaggagttcacatgtagcacctagggtattgatgcccacatatgacacagatacaatacaattcccttgattttttttgccttctcatgnnnnnnnnnnnnnnnnnnnnnnnnnnnnnnnnnnnnnnnnnnnnagatctacaatagtttgccctcgaggaataagnnnnnnnnnnnnnnnnnnnnnaaggtagaagaagatacacatgctgtggcatgcacacacactgtttcatttttcagtgacaaactgacggtgctaacctgtctggccgtctctcagtacatttacaacgagcggaacattttcatgaagtgcaaaacagatggatgtcacacgtgaggaaatgataaacctgaacctttcgtgtcaactttatagcagtatatacagttaaaattcgatgtgcgtcacctcaacaagaatgaaacaaggtttggtgtgtatatagcagctaaaatgtagtaggcagcatggcagagcatcataggtcatccaagtgctgcaaacgccctagatttcctctcaaaaaaataaaacctcgtgccttaaaacttttgcttcttaaattcaaaatagaccttttggaagagtattacaggttttcagcaaggtgtattcgacaagagcatttgcggtgcatacttctaaaaaatcagaaaattttcatttgtggttacagttataccaagaaaagcactgacatcatgcggcactatctcagcgattcagaactttgaacatcgggacatgtctatgccatagccatatttgttgttgttccactttgcaatcgttgcttttgtccttgtttgttgcaatattcggttttgggttgcttaaaccgtagatgggggtaccacaaagcgtcgatagttcttcaacaactacatcacctgatgtcggaataaatgacacaagggatagaaataaacggccacaacaacctttatcggaagttgggcaaaggaatgatacctgggtcacccaccatgtccattcgctaaccttctataaataactacctcacttgtgtagcagaatcacatttagttgctagagggagaatgcatgataaagtgtgcgaggggagcaacaatggcgagcatgatggagcgtgtcacggcctcacgggtgatagtgcaatttcccggggaatgagatgtattgagaatttgattggtagatggatgaagtgattttctctggagtcctcctctagtgtcacagtgagtacgtagccgacactacactgttgggttggtgcaatttagtctagataatgtctaggttagagattcctgaccagagtaatactatcaacggacctgctagcttcgtgatttggaagaacaggttggagcttttcgagtattagatgataaagtagtattcattgcgagtattcaagacagtggtacgataggtgaagaacacgaaccggcggataagaccttttgagcgcaagtaaatgaaacagggctttttgaagtcccggtaaataaaagagttgttgttgcacgtaatcagctggtctgagttttaccacgataattgccttgtaaaacaatttaatcactatttctcaggaaaaagacactcaacgttttctttaagacagcctgcacatatgaacacaaaatccctgtcctcctcgccttttgtgcttgagattttatgaggctttttacaaaaaatacatgtcaggtgaaatgaaacaaccaagtttggatcgaacagggcgctctctgtcatcctttggctgccacacaggacagggcaaaaacctgttaccctcagaatttagtcacattcaacaagtacaaacatatgtaactcaccgaggccaactccagcgcacgaccccatcctatccaggtgcggccgtttggggcaaaatggacataccagatgacgcagcgcgtgggcgcaaacggacttttgtccgttttatgtccgcttttgacccatcccaggcccaagtttggaccacctttgaggtgaaacggacagcgcgtggacggtcggccgcgcccgcttgtcctcccctggcccgtccgtcggtgacacaggcctccctttttctagcccctccctcttcaccgagcaccccagccgcacccgcgccactctcatccctcgccgccgccgccgctgcaattgacgctgtgcagctcggccgcgcgctcggcccaacccttgtcgccgcccccgttccctcgacgactcgagctacccaaccacgaccacctgatttgcgctcccgacggtcggatttggagcggatccggccggacatgagctcgcccggctgcgggaggccacgcggtgccatagactggccgggcaccgggccgggaggccctggcaaggccgcaatgccgcatgcaggtactgactcctcctctggctgctcggatctacatcgtcggcggttcaccggcagatacacgaaggccatcggccgggctcgttgctggcccaaaagctcatcgatgcacccttgccactcattaagtgcgacgagttgtattcacatctctcgaccccgagctccctccttcgcctagggttccagnnnnnnnnnnnnnnnnnnnnnnnnnnnnnnnnnnnnnnnnnnnnnnnnnnnnnnnnnnnnnnnnnnnnnnnnnnnnnnnnnnnnnnnnnnnnnnnnnnnnnncttccccgtaccccccgcgtcgcctccccgggcgaggcggccggggggcccttccgctgctcccctccaggctctctcctcgcatctccttcctcccgccgccaccagcgtgcgccgccgagcctcggccgcgtggtgctagcggcggcgggcctgcccttccccgtgcgcggccccccatgcccggccggtggggggctagcggcggtgctcctcggccggcgtcggtgtggcccgtcggcggtgatgccgcgtgcctcggtggtgcttgacgcggcggtgcggccgttggccgtggggcggcacggtggtgctggtggctggcggcgcccgccaagcccaaatctgggcccttttgggccccatctgggtttgggtgggccggtggctcgatgttccgcggcatcgtttcctggtgatggcatggtggcagcggtctcgggtggtgaggatttcgtcggtcggcgagctgcagcgtggcgacaggattgtccgggtccaagtggacctggccgggccgtcgaggcccggcaagtcctcgtcgccgcgtccggtcggttccgctacggcggtggaggttgtcccctccccccatccgagttgtgctcgctcccgtggccggggtctccttgcctgagctaggcctcgtgttggcagctccagagaggcggcgggggtgtccggtaaccgtggtggcacaggctggtgggcggctgttgtggtggtgcatctcgaagtgcctcgagtgatggtggtggttgtggatcgggagaaatccttgttggcttctccggcaccgacgtggtgacgcttgcgggcgccattggaccctcctgaggggcgtcggatatatctcttccccaccatcccttgcgtaccgggggaaaccctagaacttgttcgggcaacagcggcggcgtcgtcgcattccttcttgaaggtgttgcggtgcgaggcgcttcgagatgctgggagcgcggtggcacttcgtcggagggtgcagcggttgccggtcttcctttcgtcgttgatctgccggtgtcggcattcannnnnnnnnnnnnnnnnnnnnnnnnnnnnnnnnnnnnnnnnnnnnnnnnnnnnnnnnnnnnnnnnnnnnnnnnnnnnnnnnnnnnnnnnnnnnnnnnnnnnnnnnnnnnnnntcattaagtgcgactgcccaaagaaggtcttgcgccgcatgtctataacgccggagcatcccggatgggtgttcatcaagtggtcaaccgatggggtatgtgctacttagcttcggttgtgctctcggatttgactagtcgttctaacttagatttttttccggtggactggatgcaacttttggtattgggaagaagagtacatcaatatattgatagagcgaaatttagtagatgttcgtgcacttttagctagaatagaggctagagatgagagtagtgcacttgttgctagaatagaggctagacatgagactagatgcgaggaaacaacgtctacttttttagactcgaagaagaaagaagcatgtaagatcgagcctccgcagattaacaatgaatgcatcgagaaggcactaatcgaacttacgggagcagttatagaagtcggttatcttctaaaatgttttcttgtggttgttgtgttctttggtcttgctattttaatcaaaatttggtgatatgcttccatgtatcaaaaatcaatgatgaaaataaaagatatgtgcttgaaaagaaaaatgtaagcggacggaatgcggccaaaatgcggccgtgcgttgggcgcacggccggcgcatcccgaaaatggccggacacgaccccattgccctatccaaacaggcagaatccgaacaaaacggacgtccatttgggatcatgggctggagcttttccttcgttatgtcacagtaaagccctattttcacatggctcaagtccaattgcacataatctacatgcacaagaagcaaagtgcagagactaactcatgccttcaagtacatgggtcaaatgccagtgtagaagtgcagnnnnnnnnnnnnnnnnnnnnnnnnnnnnnnnnnnnnnnnnnnnnnnnnnnnnnnnnnnnnnnnnnnnnnnnnnnnnnnnnnnnnnnnnnnnnnnnnnnnnnnnnnnnnnnnnnnnnntannnnnnnnnnnnnnnnnnnnnnnnnnnnnnnnnnnnnnnnnnnnnnnnnnnnnnnnnnnnnnnnnnnnnnnnnnnnnnnnnnnnnnnnnnnnnnnnnnnnnnnnnnnnnnnnnnnnnnnnnnnnnnnnnnnnnnnnnnnnnnnnnnnnnnnnnnnnnnnnnnnnnnnnnnnnnnnnnnnnnnnnnnnnnnnnnnnnnnnnnnnnnnnnnnnnnnnnnnnnnnnnnnnnnnnnnnnnnnnnnnnnnnnnnnnnnnnnnnnnnnnnnnnnnnnnnnnnnnnnnnnnnnnnnnnnnnnnnnnnnnnnnnnnn

SEQ ID NO: 5 - DNA, 24799 bp, Artificial Sequence
  Scaffold 1900261
  misc_feature (3000)..(5309): n is a, c, g, or t
  misc_feature (5679)..(5891): n is a, c, g, or t
  misc_feature (5956)..(6309): n is a, c, g, or t
  misc_feature (6331)..(6757): n is a, c, g, or t
  misc_feature (7384)..(7453): n is a, c, g, or t
  misc_feature (8050)..(8125): n is a, c, g, or t
  misc_feature (9891)..(10507): n is a, c, g, or t
  misc_feature (10769)..(10930): n is a, c, g, or t
  misc_feature (11782)..(11929): n is a, c, g, or t
  misc_feature (14727)..(14786): n is a, c, g, or t
  misc_feature (14805)..(15281): n is a, c, g, or t
  misc_feature (16579)..(16609): n is a, c, g, or t
  misc_feature (17063)..(17272): n is a, c, g, or t
  misc_feature (17355)..(17545): n is a, c, g, or t
  misc_feature (21963)..(22064): n is a, c, g, or t
  misc_feature (23901)..(23940): n is a, c, g, or t
  misc_feature (24197)..(24236): n is a, c, g, or t
ttgtatctctatctcctcttatcctagttttcttccttcacaagatgtaatctatctcaacaacctgtacgcgtttatgggctcgcaaccctcctatttaacatgcaacacgtcggccaggaaggccaagacgtttaccgcaagtcgcacaggttcaacaagaataacaatttgcccctacggagtgctttgagattccagttttagcttcgtggtacgggctaaccataagttggaaaccatagaagcactgattacaacctagaggcatcgttgattttctgaacaaaatttcctcttttttctatttggaaatctcttttgtaagttttccgtctggagtcgaagattcttggtccgacgtcgttgagataatatcatttttcatattcgacacactcgatccggaggacaagggttgccatctcagtgaaagtaccaattgtactattgaatgttgacttagattgatgctactactctagtttggtgagtgtaagcccaagtgtgtcacataattctaagttttctgactgcctgcaatcaattgctgcaaattacgcagatggtcgaacgtccacatgaacgagatagggaattttgtgacaaataaagtttttgttgtctgaaaattatatgaaaaaaagcatacacagaggatgaatacaattatgtgcatttaaaatttgaaatttaatcaagattgtataggacctgtaaaaatgacaaattggttgcttgaatcggtcatctctgtccagtcatgcttgaaacagtgcaagtcatttcgaaccgagaagcgcatggatcgggcatctccatctagtttttgatgtccagaacaactgaatccgatttgtccaaagtgtctaaagggcagagggcatattttttttgacaaagtgtgaattttattaactcaaatgaagcatcaagaggatacaaacataatgagtacacacccagcctctgcatagctaggatgcacacagccatcaccaacgcacgcacacaaaaacaccaacaaatagcaaagtcatatacgaccaaagctatgtgttggcgaggaaaaaacccagagcgaccagatccgccttcgacaaattatagcaatgaccatatttgcaccaaccatttcaagacaccatacggacgacgaggttttcttcaacaacaatgccttcacgaagtgagcgacgctcaaacgttactgtcaccggatccaaccacacaagggcagagggcatatatctaaggtatccatcgtcaaccttacagaagtgcactctatgtccggaaccgtagtggatggatgacgtttcatggctgtgtggtgctcagacatgtcgattcccttggagatgttgatggttgaggttgtgcgcgtcggggcgtaataccaaataaatatttgaagcaccatgcacaaaaatgcagcggtacggatcaactgttttgtgcttcatgtgcggcacagatttggtttccttcaactgcgacccgtttgtcatttcaatttgtttgtctgaacagtgcagatgtacaaacatactatgtgcttgggtcatttccatgaactaggctatattcccaagtattttgactgcacaaacattttgaacaccgtaacatacctgggcacatgctgctgattgtctaaataactttaactgacattaacaacgctattttgtgtacttgcaattttgacggtgaatatcccatgcatatctactattaaagattcacggttgggggaacctggtgtaattcagaaagggggagtaatgggtaaaaaggacaaatacgtttgtaagttctaatccgtacataagttcaacatttttgttggcaaatacatagcccccacatcatgcggaggaaggaattggttggcaggcgaattcaagctgcctttcgaatagccagacattccactgccctatatataagatctgaaaggagaaactcttaacttaaatcctagtaagtgatgtttgtgtagagtttcaggattgatacgtttggctctgcgaatatgaggcatctggaataggacttcgaggcttagagttgatgttagtaacggacgtctatggtgcacctcttttcccttcggctgaactttggctcaaggtgttgcagcactccatgcttccactcgccctccttccaccagaggccacgggctcgctacaccattggtgggaaggagggagcatcctaatccccgtaatccatatgaggtcttggagttcactcgtgcaactagtttggtggctctcatggaaggaacataacgccagtatcttcaacgacgtcacatcctctgtcacccaagttctgcagcgcatcctaatacaattgggccaatggacgacagccaggaagaacaaggtcgcaccaaagatccatagatctcatgagccagactaagggtggcatagaggcataggcatatatctggggtgtgggttgtgcttctttattttacccgcagtccacatgtaataaacatttttctaaatttaatgaaacgctgcgctgacagcctttcctgaaatataaaatgtagtgacccactgttagttttacttctacgtagagcaaattctaagtgttagtcgcgagtgatctactcttctcacaagtgcggcacttatgcaacatgcagccctgatatacacgaacaactatcaccgttgcatccatatgaaagatgaagtgaagaaaaccgtactagccgagaaggtgagagtaggagtcaagaaatataatctaatactcgagaacttggagcactgcagcaatgaccaaatctgaggagtaaattgccgaccactaccacaattgcgtcgagtagtctgcagagccatcgaagtgctaaaagttgcaaaggtcactgtttttggttattattattttctgccgcaagcactaagtgcttgattgagcatgtttggccgaaatctaacattctttgacttgacaatttaggtnnnnnnnnnnnnnnnnnnnnnnnnnnnnnnnnnnnnnnnnnnnnnnnnnnnnnnnnnnnnnnnnnnnnnnnnnnnnnnnnnnnnnnnnnnnnnnnnnnnnnnnnnnnnnnnnnnnnnnnnnnnnnnnnnnnnnnnnnnnnnnnnnnnnnnnnnnnnnnnnnnnnnnnnnnnnnnnnnnnnnnnnnnnnnnnnnnnnnnnnnnnnnnnnnnnnnnnnnnnnnnnnnnnnnnnnnnnnnnnnnnnnnnnnnnnnnnnnnnnnnnnnnnnnnnnnnnnnnnnnnnnnnnnnnnnnnnnnnnnnnnnnnnnnnnnnnnnnnnnnnnnnnnnnnnnnnnnnnnnnnnnnnnnnnnnnnnnnnnnnnnnnnnnnnnnnnnnnnnnnnnnnnnnnnnnnnnnnnnnnnnnnnnnnnnnnnnnnnnnnnnnnnnnnnnnnnnnnnnnnnnnnnnnnnnnnnnnnnnnnnnnnnnnnnnnnnnnnnnnnnnnnnnnnnnnnnnnnnnnnnnnnnnnnnnnnnnnnnnnnnnnnnnnnnnnnnnnnnnnnnnnnnnnnnnnnnnnnnnnnnnnnnnnnnnnnnnnnnnnnnnnnnnnnnnnnnnnnnnnnnnnnnnnnnnnnnnnnnnnnnnnnnnnnnnnnnnnnnnnnnnnnnnnnnnnnnnnnnnnnnnnnnnnnnnnnnnnnnnnnnnnnnnnnnnnnnnnnnnnnnnnnnnnnnnnnnnnnnnnnnnnnnnnnnnnnnnnnnnnnnnnnnnnnnnnnnnnnnnnnnnnnnnnnnnnnnnnnnnnnnnnnnnnnnnnnnnnnnnnnnnnnnnnnnnnnnnnnnnnnnnnnnnnnnnnnnnnnnnnnnnnnnnnnnnnnnnnnnnnnnnnnnnnnnnnnnnnnnnnnnnnnnnnnnnnnnnnnnnnnnnnnnnnnnnnnnnnnnnnnnnnnnnnnnnnnnnnnnnnnnnnnnnnnnnnnnnnnnnnnnnnnnnnnnnnnnnnnnnnnnnnnnnnnnnnnnnnnnnnnnnnnnnnnnnnnnnnnnnnnnnnnnnnnnnnnnnnnnnnnnnnnnnnnnnnnnnnnnnnnnnnnnnnnnnnnnnnnnnnnnnnnnnnnnnnnnnnnnnnnnnnnnnnnnnnnnnnnnnnnnnnnnnnnnnnnnnnnnnnnnnnnnnnnnnnnnnnnnnnnnnnnnnnnnnnnnnnnnnnnnnnnnnnnnnnnnnnnnnnnnnnnnnnnnnnnnnnnnnnnnnnnnnnnnnnnnnnnnnnnnnnnnnnnnnnnnnnnnnnnnnnnnnnnnnnnnnnnnnnnnnnnnnnnnnnnnnnnnnnnnnnnnnnnnnnnnnnnnnnnnnnnnnnnnnnnnnnnnnnnnnnnnnnnnnnnnnnnnnnnnnnnnnnnnnnnnnnnnnnnnnnnnnnnnnnnnnnnnnnnnnnnnnnnnnnnnnnnnnnnnnnnnnnnnnnnnnnnnnnnnnnnnnnnnnnnnnnnnnnnnnnnnnnnnnnnnnnnnnnnnnnnnnnnnnnnnnnnnnnnnnnnnnnnnnnnnnnnnnnnnnnnnnnnnnnnnnnnnnnnnnnnnnnnnnnnnnnnnnnnnnnnnnnnnnnnnnnnnnnnnnnnnnnnnnnnnnnnnnnnnnnnnnnnnnnnnnnnnnnnnnnnnnnnnnnnnnnnnnnnnnnnnnnnnnnnnnnnnnnnnnnnnnnnnnnnnnnnnnnnnnnnnnnnnnnnnnnnnnnnnnnnnnnnnnnnnnnnnnnnnnnnnnnnnnnnnnnnnnnnnnnnnnnnnnnnnnnnnnnnnnnnnnnnnnnnnnnnnnnnnnnnnnnnnnnnnnnnnnnnnnnnnnnnnnnnnnnnnnnnnnnnnnnnnnnnnnnnnnnnnnnnnnnnnnnnnnnnnnnnnnnnnnnnnnnnnnnnnnnnnnnnnnnnnnnnnnnnnnnnnnnnnnnnnnnnnnnnnnnnnnnnnnnnnnnnnnnnnnnnnnnnnnnnnnnnnnnnnnnnnnnnnnnnnnnnnnnnnnnnnnnnnnnnnnnnnnnnnnnnnnnnnnnnnnnnnnnnnnnnnnnnnnnnnnnnnnnnnnnnnnnnnnnnnnnnnnnnnnnnnnnnnnnnnnnnnnnnnnnnnnnnnnnnnnnnnnnnnnnnnnnnnnnnnnnnnnnnnnnnnnnnnnnnnnnnnnnnnnnnnnnnnnnnnnnnnnnnnnnnnnnnnnnnnnnnnnnnnnnnnnnnnnnnnnnnnnnnnnnnnnnnnnnnnnnnnnnnnnnnnnnnnnnnnnnnnnnnnnnnnnnnnnnnnnnnnnnnnnnnnnnnnnnnnnnnnnnnnnnnnnnnnnnnnnnnnnnnnnnnnnnnnnnnnngtaagcaggaagtttgcaggaagtgaaaaccataggaaggtttcccaaacatgcgttctgtatgccggatttggctccaaatattcaagggaaagggatgttgcctctatttttacgggaaagaaaacgtcgggtggaagctcattttatggcggaagcacgaggcaatgtgaaggaaagtagagctagcccaccagatgtctttgttccagtgctatctaggaccccacaactgccagatggaggcatcacatgcgttgaaacaccaataattctacactcaaggacaaacacggagattttactgccgcctttaatagtcattaacttctccaccctgaattttagggggtctctgtatgcaggaaannnnnnnnnnnnnnnnnnnnnnnnnnnnnnnnnnnnnnnnnnnnnnnnnnnnnnnnnnnnnnnnnnnnnnnnnnnnnnnnnnnnnnnnnnnnnnnnnnnnnnnnnnnnnnnnnnnnnnnnnnnnnnnnnnnnnnnnnnnnnnnnnnnnnnnnnnnnnnnnnnnnnnnnnnnnnnnnnnnnnnnnnnnnnnnnnnnnnnnnnnnnnnnnnnnnntatatagcacactttttttgtccaccccctgacatggcaaaatctgggaggcctggcttgcagannnnnnnnnnnnnnnnnnnnnnnnnnnnnnnnnnnnnnnnnnnnnnnnnnnnnnnnnnnnnnnnnnnnnnnnnnnnnnnnnnnnnnnnnnnnnnnnnnnnnnnnnnnnnnnnnnnnnnnnnnnnnnnnnnnnnnnnnnnnnnnnnnnnnnnnnnnnnnnnnnnnnnnnnnnnnnnnnnnnnnnnnnnnnnnnnnnnnnnnnnnnnnnnnnnnnnnnnnnnnnnnnnnnnnnnnnnnnnnnnnnnnnnnnnnnnnnnnnnnnnnnnnnnnnnnnnnnnnnnnnnnnnnnnnnnnnnnnnnnnnnnnnnnnnnnnnnnnnnnnnnnnnnnnnnnnnnnnnnnnnnnnnnnnnnnnncaacgtaccttattctggtggnnnnnnnnnnnnnnnnnnnnnnnnnnnnnnnnnnnnnnnnnnnnnnnnnnnnnnnnnnnnnnnnnnnnnnnnnnnnnnnnnnnnnnnnnnnnnnnnnnnnnnnnnnnnnnnnnnnnnnnnnnnnnnnnnnnnnnnnnnnnnnnnnnnnnnnnnnnnnnnnnnnnnnnnnnnnnnnnnnnnnnnnnnnnnnnnnnnnnnnnnnnnnnnnnnnnnnnnnnnnnnnnnnnnnnnnnnnnnnnnnnnnnnnnnnnnnnnnnnnnnnnnnnnnnnnnnnnnnnnnnnnnnnnnnnnnnnnnnnnnnnnnnnnnnnnnnnnnnnnnnnnnnnnnnnnnnnnnnnnnnnnnnnnnnnnnnnnnnnnnnnnnnnnnnnnnnnnnnnnnnnnnnnnnnnnnnnnnnnnnnnnnnnnnnnnnnnnnnnnnnnnnnnngaatttccccgatcatcctttcattttcctgttgattacaatcaatagttttactaggcctttcctacgacattcctcctttttctagattcctatggctttccaaacctctgatccgaataggccctaagataggtgtgcggcccgccaatcagcatacacacattcctctatttttcatctaaaatatgaggaaacttatgtaatagttaggtagaaaatcaatgtaaaaagcgtccacttgaaataaaatgacattgtttccctgggtgccatggagctatcaaaatatcaatgtgttcactgtaaaaaatagtttgcaaatgactggaattatttatttaaattgagtgaaataaatcttttgaaataactgaaatcagtgttttaataaatgaaatcaacattctgaaatgagtgacatagttgttttgaatatattccatattatttgtttttaagaaacgagtgaaatttgttttgtaggaatgaacgaagtatgttttaataattttaaacccgttttaaatatattcaggtttctcttgttttaaggatttagatgttaggaattcaaatatgtgaaaaaaaccaatgattaactcactaggaaaataaaatgaatannnnnnnnnnnnnnnnnnnnnnnnnnnnnnnnnnnnnnnnnnnnnnnnnnnnnnnnnnnnnnnnnnnnnngtattcctctagttaatcttatgcatcgcatccctcgcaaaaaaaaaccttatgtaccgcacaggagaactctttttgaaagtatacctataaagttgaaatgaatcttgacgttacaatgagtggtggatccattatcggtacatactgagtaacgttaggaaaaacaactttcattacacgcacgacctgggccaccgcgtctcttccaatcaactgatatcgttgtcgagatgcttcgaggtcctcccgaagccggcgtcgcggaaactcgcccacacctgtttctccagctccttctccccctccgctggggccattgccggccacgccgacgccgtcctgccgaacttgagcacgctgtccgcctcctcgcggagcttggccatctccgcctctcccaccgtggccgagcgtctgagccggctacctcgcaccgcgcggcggcacagcgccaccggcgcgcgcaccgtggcgaggaaggcgaagtccaccaccgcgcacgggaggaggcagcttgcggtggctaatccacccatcgtttcaccggtcagctgcttgcacccgggctgccggtgcttggtcggctcgccttcnnnnnnnnnnnnnnnnnnnnnnnnnnnnnnnnnnnnnnnnnnnnnnnnnnnnnnnnnnnnnnnnnnnnnnnnnnnncgcgtgggagggcgaccaagcgctccagcgccgtctttggccttgcctccgggtactccgttggcgtggtggtgaacgtgggccatgctgctggagcgaccggccatggccggtcgcgtggggcgcgccgtggctgttgcagccgagctgccgaggtcgcccgccatagaaccggccaccgggatgtcctggctcccgagaacaacaattaggcgtcggtgaatggcgagagaccaagagttgccatggatttgaggctgggcggcgaagccggtcggcctctctgcctctctccaagttgggacttgcgaggggcgggcaagagctataaacgggtaaggcaaagactgccatgcatgtccaacgagacccaataagaacggtaggtggtgacgactggtggtgcatgtcacaaaactaaaaacaacttcccctgtaaaaatttcacactctctttcctatgggaagacatcttttaggctaaattatgggtaatttgaatttgattacatggatgcacagaacaataaatagatctgatcacaggtagcacgtcgccacatgcacccatgcatatcaacagccggtggaagtgtatttggtgtataacatgcgcttgtaccagtagaggatggcgcattgattggccgcctgttgatttgaggtatcgcaagctgacggctatccaactataggacgtcggtgcatggttcttgccttgaagacccatgggtacgattggctgccggtttcttcttcaggggcaaaggaaatgctaggtaaaggcagctcaactactacagagaggcaccaagggagggagatatctatcccatgtggaagaggacgtatggtggctggtggtgcatgctcacttcgagtatcatgtattgtgaatgtcaccatgttcttagcttcacaacattctgcttattttatttaaatctccataaatgaatttccttgtagaacttctacatgcccataaaaagaagatctcacgagtcacgacaggacggagtttgtccattatttttctagggccccattttcatggatactatatcaagccttcaagagcatatgcaaatgtaacaataatgtttggccaacaccacatatacttactttatgtccataaaagtctagtagaatggctgctgataacacagtatataaacatgatcatcttctttgttgccagggaaacatgaccaccaactagagtagttttcttttttgccagtgttggatggatcaatctgtttttgttttttcacgccatggagggttctagtaaccaggattgggattcacagggaaattgggatacagattgatacaagaaaatgaggcaaaagtgtttagtgcaccatatgtttggagatatgtctctacggaatccttgcagaacgaacgttccggagaaatcatgtcagaaacttttggacccgacgacccaaaggctcaacacctaccggcaaagaccacgacccattgatgggaaggcaaaaaattgccatgcatgtccaacgagacccagtaagaacggcatggtggtgacgacttgtggtgttacaaaactaagaaaacttcccctataaaaatttcataaactctttcctatgggaagtcattttttttggctaaactatgggtaatttgaatttgatcacaggtagcacgtcgcccggtgaaagtgggttattctttcgaactactacactcgctcacgcagccgcctcctctgcaaaaaaaaaaacccnnnnnnnnnnnnnnnnnnnnnnnnnnnnnnnnnnnnnnnnnnnnnnnnnnnnnnnnnnnnnnnnnnnnnnnnnnnnnnnnnnnnnnnnnnnnnnnnnnnnnnnnnnnnnnnnnnnnnnnnnnnnnnnnnnnnnnnnnnnnnnnnnnnnnnnnnnnnnnnnnnnnnnnnnnnnnnnnnnnnnnnnnnnnnnnnnnnnnnnnnnnnnnnnnnnnnnnnnnnnnnnnnnnnnnnnnnnnnnnnnnnnnnnnnnnnnnnnnnnnnnnnnnnnnnnnnnnnnnnnnnnnnnnnnnnnnnnnnnnnnnnnnnnnnnnnnnnnnnnnnnnnnnnnnnnnnnnnnnnnnnnnnnnnnnnnnnnnnnnnnnnnnnnnnnnnnnnnnnnnnnnnnnnnnnnnnnnnnnnnnnnnnnnnnnnnnnnnnnnnnnnnnnnnnnnnnnnnnnnnnnnnnnnnnnnnnnnnnnnnnnnnnnnnnnnnnnnnnnnnnnnnnnnnnnnnnnnnnnnnnnnnnnnnnnnnnnnnnnnnnnnnnnnnnnnnnnnnnnnnnnnnnnnnnnnnnnnnnnnnnnnnnnnnnnnnnnnnnnnnnnnnnnnnnnnnnnnnnnnnnnnnnnnnnnnnnnnnncacccggtggaaatgcatttggtgtagcatgggtttgttgcagtagaggatggtgcattgcttggcggtctgttgctttgaggtatcgcaagctgatagccatccaatccgcactataggatgtatggacgccggtgcttggttcttatcttgaaaacccgtgagtacaattggctgccgatttcttcttcaggggcaaaggaaatgctaggtaaaggcagatcgaactactaaagagagccaccaaaggagggagatatcnnnnnnnnnnnnnnnnnnnnnnnnnnnnnnnnnnnnnnnnnnnnnnnnnnnnnnnnnnnnnnnnnnnnnnnnnnnnnnnnnnnnnnnnnnnnnnnnnnnnnnnnnnnnnnnnnnnnnnnnnnnnnnnnnnnnnnnnnnnnnnnnnnnnnnnnnnnnnnnnnncgctcgtcagggtctgactgggcaaaaaaaatgccatgagtgggcgcccctatgttgagcattatatcgaaaagtttgtgtgctttaggaggagcacttggagacgggcagcgccggcctcctcggcctcggcctgccagcgtctgcgctccatcctggtggcgtggggcaccactcatggtcgtcgtgatccacacctcccaccacaacatggctgccatgtctaggcgcaacggcatgtgttgcctcgccacaatgacctcgacccagagagctcgcccagccgttgcgactactcacctccgctgactagaaaactatctatggtgtccccagactgctcacctccactaaccagcatggcatccatggccggaggcggtgtttgtgccaccagtgtgggagcggctagagctcctggcctcccgaatcctgctgcggtggaggcggtcgcaaaggaagcccccgggtggtgcaatgagctcctggggacgtgcttctagcatccctccttcctctgctggagaggcgacgaccgcggcatggccaggagcacctccacctagtgtccacggcgcggacaaaagttgaggggagggggagaaagtaggcatggtaggagatcgaaagatgtccaccaaggccacgggcgggcacttgctacggcgaaggcagacaccgagggaattgaaggcaccggtggcggcttgaatggggaccggggcaagaggaagaggagagtactttttttacgggtgaggaggacgaagagagttggctagagaagaccagtcaaagtgcccacgtgaccttttcttgccaagttaactcctgacaagtggggctcatttnnnnnnnnnnnnnnnnnnnnnnnnnnnnnnnnnnnnnnnnnnnnnnnnnnnnnnnnnnnnnnnnnnnnnnnnnnnnnnnnnnnnnnnnnnnnnnnnnnnnnnnnnnnnnnnnnnnnnnnnnnnnnnnnnnnnnnnnnnnnnnnnnnnngggagatatctatcccatgtgcaagaggacgtatggtggctggtagtccatgctcacttcacagtatcgcgtattccgaatgacaacatgttcttaattagctcgaaaacaatatgttcattttctttaaatcatcataactgattttccttgcagtacttttatatgcccataaagagaatccgataaaaatatgatcccacttaatcaatgaaagcctttcattcgtaaaaaaatgataaaagtatgatctcatgagtcacaacaggcggcagtttgtccatttattttctagggccacatttcatcgatactatatcaagcctttatgcacatatgcaaatgtagcaataatctttggtgatcaccacatgaacttactttctatccataaaagtatagtagactggaagcttataatacaatatataaacatgatcaccttatttgttgcaagagaaacatgaccaccaactagaacaattttctttttcactaatgttggatggatcaatatggttttgtttttttgttttttcacgccatggagggttctagtaagtaggatgtggattcactgggaaattgggctagagattgatacaagaaattggggcaacacttgtcagtgcatcttaagtttagagatatctctttaacgaatcgttgcagaacaaacattgtttttttagaaggaacaatgaactttattcaaacatcaaggttcaaaggaatacaaatgttgggggcggggggattacataaccaaacatgccagccaaactcgagcgagctcgccatactagctaatttgtgagactcctcattagatgtgcactactcatggcatatttcacatgccaaaaacattaacttgttgtccttgatctcacgaagaaacatgcaataatctcctctgttgttttccatgtgtagatcatttaccagctccaagcaatccaaagcaactctgatcctggaaagtcccaggtcttctccaagagcaaaagcttgtctcaattatcactggactcattaccccttcaaatgcaacagcagaagcacccagataatttccatcatcatcttggccaaccaaccccgctgctcccctgttcgccaatttctctaaagccccacccgcattcagctttgcttctccttgcgctgggggaatccatttgcaaactcccatttcaggccgctgtccagcatgcttagccggtgtttttggttcccttatttcatctagaaacctgctgataaagaggtgtttggacaatggactttgatactcgttctcatgaatcaccttgcgtctcttgcccaccaaatcgtccagagcgtcacaagaacctcgacaaactaatcttgcttgagtgtactgcacaagctcaacaatcataactttgggtacgagatgtcatcgccatacatggggatgaccggatcatcctctcttaaggcccacacacactttacgatgtcacactcaaggagaccatgcttccaagaatcaattgcagagttgcacactgtgcatgttggcatcatcgtcatctccctgcgtgcacactcttcacccgttagtagagaggatctcaccagtctccacacaaagacttgcagttttggcggcaccttaatccaacgacccaatggcccaaaaactacaagcaaagaccacgggtgcccagaaaaagaatgcgtgcctaactggatcagaatgggcctaggtgctgcgacccgctcagtgacttacttatcatgattatctttcagccattctctaatgtgtggcttcgatttgtattctctaatggaaaattgagagttaaattaaagggaggtgtaaacatgttatcttggcacggttctcgaatccaatctttctgtccgcacataagaatatgacatggcgatgaataagaaatttacaagtaggtgtggcctcaaatttaatgtatgtatgcctattccacagactccataccgtcaatgccactagacaccgctagaaagccttgcttcttgtagaatctagacgcttcagtagtggctgctaagccacctatgggtgaagggcccaaacttctcttagaaacacaactagtttctggtaacctgtggaggtcacctactggttccctttattttatttttcctctacgtcccactctatgctatgtattcggtgacttcaatttttatgtgctactaacaaattgatggtgaaatcatagtgagatgttagcaaattgtaccagctcactatcccacgcgcgtgagacatgagatcaagaacaaacagtgatggcagccgggtcaagtggaaattgcttaactgcactatggtcaacgttccgtactactacttggtaacatataatggccacatataatggctttctcatgcagcaaatataatggctacacacttgtgcgagggcaccttgtttgtttcatagtttaagagtgttggtggaggagagcaaagataacaagcatgcacatgtcgtgcaacactggttttcacgtggagagtatatatagtaaaccaagttagtactttcggaagaggaaatctttgagttattgcaagcagatagcgggcatgcgctacgtggttcacgaattatcaggcaattctatttggtacatcgtgagcgaaagttactacccaatgcgagatgacacgagggtaacctatgagtaacatcgaggaaattttgtatatcaaagacttgaaggtttttctaagaaaatttttttaaaaaaattctcctactattaaatannnnnnnnnnnnnnnnnnnnnnnnnnnnnnnnnnnnnnnnnnnnnnnnnnnnnnnnnnnnctactttgtttatgatttnnnnnnnnnnnnnnnnnnnnnnnnnnnnnnnnnnnnnnnnnnnnnnnnnnnnnnnnnnnnnnnnnnnnnnnnnnnnnnnnnnnnnnnnnnnnnnnnnnnnnnnnnnnnnnnnnnnnnnnnnnnnnnnnnnnnnnnnnnnnnnnnnnnnnnnnnnnnnnnnnnnnnnnnnnnnnnnnnnnnnnnnnnnnnnnnnnnnnnnnnnnnnnnnnnnnnnnnnnnnnnnnnnnnnnnnnnnnnnnnnnnnnnnnnnnnnnnnnnnnnnnnnnnnnnnnnnnnnnnnnnnnnnnnnnnnnnnnnnnnnnnnnnnnnnnnnnnnnnnnnnnnnnnnnnnnnnnnnnnnnnnnnnnnnnnnnnnnnnnnnnnnnnnnnnnnnnnnnnnnnnnnnnnnnnnnnnnnnnnnnnnnnnnnnnnnnnnnnnnnnnnnnnnnnnnnnnnnnnnnnnnnnnnnnnnnnnnnnnnnnnnnnnnnnnnnnnnnnaaaaaaatcctttagttaccatgtatttataatatccgtatataacaacattcatatttctcgcatctataatatcccatgtatttgaattgaatgttaatccaaactcaagaaaaacaatctggattgtaaatattgtaatagaagtatcaacttggtagtttattttctgtaccaatccctggatgtggttgaaccctaaatgggtttggaaatttagaacatgataaatgtgatgtttgctggtggtcctcaaattatttattgatgtaatattgaagtgcttaggtagactgtacgtatatggcccctcccaagctccatatatgtatgtacctgtagcttatgtgatctgtcgccagctagtaaatcattttagctcacgtcgatcttttgaaacaaactatgtgaatgcctggtaaattgcaagaatgccttatagtgaagatagacgtgtgcctcatgcagtttgaaggaggtattgttcgggaatgagacacatcagaaaattggtctgatgaacaaggttttctcatggatgaaccacattccccttccgttcaccgctatttttccaccaacgaccctaaggcatgatagctgtctgggcatgtactgctcaccagcatagctattcaccgctcatgtgtcccatatcaagcttccattgtccatggctggcaaacaggttgctagtgggacgggctgtggagcctgtagtgccgcattcttggtccggtggctaagtgactgatcacgaagtgattatgcgggatatgtgagagccgccggaccagctagggacgaagggtcgcacttcagcaatgctgcctcgcacctaaaagcgacatctctctccctagcgctctccaatccagcggaaagaaaaaaagatctctgatagccgcctctagacacaccatgtcacctgcacgcccaggactacctggcatgccctacacacaacttttgttcttgttgccagtttttttccggtagggctgggaaaacctgtttccaaaatatctcagaatttttagattttttcgtctaaaatttcaaaacgaaattcaaattcagtattgtttgcaagaaattacaaattcttacagtttcaatatattatgttaatcctatggtgcatgctaattaattcctattggagtggtcagcttactttgttttgaaccagtacctccaggagagaagtcgtacgctgtaagcctgtaccaaaaggccaatggctaggttattgtagtacacgtataccaggcttatttttacagcacttgaatgtnnnnnnnnnnnnnnnnnnnnnnnnnnnnnnnggtactgaaaaatctagagcacacaaaaatttcggtaactggtaagttaccgaaaatgcgaccaatagaaaacatgtgtacgccttgacctctgcctccagatcatgccaaacggcatgcttgttgtggccacgcaccaagcgccgatatccgcccctagatctatgacgagtttggtggctcagcaaaggtgatggcgatgagttgtagaggccgcaatggaggaaccttgtctaggtggcgactcggcaaaacaatctctgaataagcaccacttgtccatcggtcttcaagctccatcaccaaaccatactccaacacacaaaagtaaatatcactgacccgagatccccccgccgccaaccactcacccgcccttatttgttcgtccttttcgagagcacatgttgtcgctatatctttatgaagcattgaggacaatggaaattatgtnnnnnnnnnnnnnnnnnnnnnnnnnnnnnnnnnnnnnnnnnnnnnnnnnnnnnnnnnnnnnnnnnnnnnnnnnnnnnnnnnnnnnnnnnnnnnnnnnnnnnnnnnnnnnnnnnnnnnnnnnnnnnnnnnnnnnnnnnnnnnnnnnnnnnnnnnnnnnnnnnnnnnnnnnnnnnnnnnnnnnnnnnnnnnnnnnnnnnnnnnnnnnnnnnnaaatatagacgcgctacattatggaacgtagggagtatgttagataattgtggaatgacatactgcctccaaacggaatgtcnnnnnnnnnnnnnnnnnnnnnnnnnnnnnnnnnnnnnnnnnnnnnnnnnnnnnnnnnnnnnnnnnnnnnnnnnnnnnnnnnnnnnnnnnnnnnnnnnnnnnnnnnnnnnnnnnnnnnnnnnnnnnnnnnnnnnnnnnnnnnnnnnnnnnnnnnnnnnnnnnnnnnnnnnnnnnnnnnnnnnnnnnnnnnnngatatacaagaatcttacttgtactttataatgtaattttacataaaactttttatgatttgtagtcttatagtttaaaatatttcatattctcagttatgaaagactggttaaggtcaagagctattgtggatatacttatgtgcattgttgatggttgtcgaatggtggaattcttttgtttaagtttggtgcattacctcatggttgattttcgtatttggtagatacattttttgctggattgaatagtgtattggtttcagatgataacattttttttgtaaaagtgaattatttgtttccgcaaatgatgctcaaaatccagttgtttattttctaaatgtgcttgttggtctagaaatcttggctgaattgtgtcaaaatatttcttcgcatatctcatatttttatggtatcctcacaatctcggataggagataaccacatataccttggacggtcaacgaaacgaaatcatagcccacatgtttcaattgatataacctgccaaacaagctctttgcacggtatgtctcatccaatacatgctattatcttagcaggatggtatatctcaaaggagtgtaattgtcttaccttcaagaagatttttcctttctttaaggcattgaagcatgtgttcatcatgtccaatcaaagcgtcgagatctgttttagttggaactacataacctagtatctcttaggtatgttgatcgacctgttaggcccagcttctattgtccatctgaacagaactttgtacaaaaaaattctatagcatggtcactttaataaaaaaacataggaggctcgcaccactactgtttagtatcatataaaaaatgattactaaacatttctactttcaatacattaagcttaagtagcaaattcggattttgagtgcatcggctgctttcagtcagacatctattacacgggtgtcctagttgcgatgttgatgcacttctcgtcagattcaatggcatactccttgttcaatggtttgctattcccatggttaatgtgcctgagtcgtcaagaaattggacagggggcccagcaagcagggaaagaaaatattggaaacgtattcgtatgtacacaactgacatgtgtttgcacgtgtacttgaaacaaataccacctaaaatggtttctgttggacaaaacctcaaatgaattgtgatggtttctttatttctatggcatggacaaaagcgatgcttctgtagacatagactatataatggtttggctgcagaacaatcttaatcccttaaatatacatgtagctaagtataatttagcatatttcttatatgttgttcaacaacacacaattatgtccatattaatgggagatgccaggaccgcaatgtggtatcctaaatggatgactcgttcattaattccgaatgagactgcaatgcttgagcaacaacaaactggtgcaaaccttataattccaacaatatcattagtaccaacggtaggtcatggtgaatcagtgctgaaatggtactttatgtgatatacattcgtgttcttatgaatctttcttctatgacatagatgtgcgcattgagcctgcactagcgcctagaacctgtcacaacaaaaatctcgcttgtattgtttatttgttggtgtctgctagatagcgtgcatattcttaaggtgatatggcatgtaaaacatatatttactattaatcgattagcatgaaatagttgaacctatcaggtcattttttttttctatgaagacaatatcgaggttgggagtccataaactacgaaatattttagtcaatttcacatggggagcttcacgtaaccaatgttgtgtaatgttcaacattttgttgttgctgaatgttaaaagtgagcggcacaaaattagttttacttttctagatgcagatagttatttatttatttgccacactctgtattacgaaatagaatgacaatgacacagctgctaggagctaagtatcatcttgtattaaatatggatatatttagaaagtcacttatgttaaagaattagaatgttgtgcagagtagagatcagttagatggaggcatggagcagcacgtcgcaaaaggaatagtgtgatccgtacttcttttgtatgaaggtcatcatgagtaggtcgcacattcaatacctatatataaaatggttgaatatccttgcattactattctttttacatttcgttctcctcccgcagactagtacgatatccatgttttatcggcaattgcatcttacattgtgcataggcatgggagtcaatccagaacacccaattgtatgctagggaactaaagaggagctcgagtttgtcaacccagggggagagactcaaggatcataactctcaccaacttcattgtgttgttgatacttcaagctcaactaactccttcatcttgtaatcttcctattgttctttcctatattaatgattggccatataactgacaactacatataccatgtatccatgatggcaagagaatttagggacctgaggtttctgggattagttgcacattcttgaatgctaatatgattaaattgtagtgaattgtcatctctcatatgggtttatcctaaaaggctgaaactgatggttaattctctctatgatatgcatgagaagcttcgtagatgccatgaaaggagagcggttattctgcacccaggctcatctacacccgggcgttaacaataaattcaaaacaaacagtaaaagattcaaaaaattctgagttttttcaaatccaagatgctcatgtgtgcatggtgtgtgcaaaatttcatggtgtttggaaatcagctccgaatgatgttccttttcaaagtttctcacacccggacgtgaacagtgacttcaaaaataatagttataaattttttgacatttttagagatccatgatgctaatgtctgcaaggtttgttcaaaatttcgtgttattttgcatttactgttcaccggttgtaattgagcctgggcaccatattgaattatcaaattgaaagcaagtttactagcgtgtaatactacattgaaagaataggaaatagccatgtaatatttgggcagggaaaaacgaaatggagggaaaaattaagtgcccaaggggagtcgtgttaagggtatgaaactaaggtaagaagacaattaaggatgataaaccactgagatcaaaaataggttatcaccttcaataacataaactttgtaaatgtaaagctttaccttagctgcctttcttcactaattactaatgaagctcctttgtaaagccagtaataatttactactattcgataggataaaatagagtgtgacaaatgtgaaatacttaaccatattaacaccatggacgatgattatggatttttacagaaattcattcatgggactagtgtgctttgctttacttgggccatctgagctagctatccaaaactacatagattttcatgtactccaaacaaatcttgtggtaattttaccaaaaaacaatcttgtggtaataattacaagtgtcgggagtcatgtttcgagtaaacaaagatcagtctattttactcaaaaaatattaactagtgactaaaataacttattttctggaactctgttaggtcagtaaaagttaatcacatgggccatcttccaagctctacgcaaattagcaatctatttgcaagacaatggtagctcattagtcaaaggtataagtgaaaatcgaggtaggtctaaagtttgcatccctgttagtactaggcattcttgtagttgtatttttaaaatttgcatctaactaacttccataaggttgatgctatgtatgcatggtgcacttggcaatttgttggatatctatgcatggtgaacttggtgcatctatgtatatatatgttgtttcaaatgcagggttggttcaacaagacaaacaaacaaaaagcagtttgacacgtacactgagagtaaaacatggcttaccacatgtaaatcagctcgcccagagagcagcactcggcttacatgtaagtcgggccgcccagcaaaaagtcctcgcctgtttaccatacaagtcgaatatatgaacatccatacatggtttaatgggccacattgcagaacgtgggcagcggagcagcacatggcttgaaccggcaaatcctaaacggcgcccgttgcgcccgtttcttctatttcgacaaacgggcgcacaccctctctccgcgatgggctggccccttttcattttttttcgttttctgaacttgcaaaaagggcgtgacggggaatcaaaccagcgccgcggggttctccatagaacgcgctaaccaacacagccaagccaccttctgtgactatctaannnnnnnnnnnnnnnnnnnnnnnnnnnnnnnnnnnnnnnnnnnnnnnnnnnnnnnnnnnnnnnnnnnnnnnnnnnnnnnnnnnnnnnnnnnnnnnnnnnnnnaaaatcgacgaactttttttcaattgtatgaactttctttccgatgaagttttcttcaaaatacgccagctcgttttctccaaattttgttcatgttttcgaattttgttcacgtttcaaaaatagttttgaattcgaaatttttgttcaccgtattgaagaaaaatgttcaccatacattgaaaaaatgttcactgtttataaaaaaatgttcatcatgtatagaaattttgttcagcatgcaatcaaaaggagttcatcgtatttaaaaaaagttatatgtgtatttgaatattgttcaccatacattgaaaaaatgttcagtgtgtataaaaaaatgttcatcgtgtagagaaagtttgttcaacatgcattcaaaaaaagttcagcgtattttaaaaaaatgttcagtatttctttgaataatgttcaccctatactaagaaaatgttcaatgtgtattctaaattcgctttctaaaaattgttcacagtacaaaaagagtattcaaatttcaaaatctgttcagtttttgaaaaacatagttcacgtttaaaagaaaaggaatattcgaaatttgcgtatgattttagaaacatttgttcgcatatttaagattttcattttttccaagaattaatggaaaatgttgaaataccccggatctaccatttgggctggtacttaaaaacaaacaccgtttttaggacgtagacaattagtatcccagctggccagcttcgttagcatgcagcgctaggtctggagtttgagtaccgttgccattgtttttgtttttcaattacctcgttcgctcgaggcttcgtttgagttttctgcgtacgtcgcgtttcgtgggccggcccaactagccaggcgcgtgggcgccggttctcctagccagcgcttaaggcgccgactaggagctcctgcttaaacccatcacaacgtttacctgtaaaccgtgtggccttctgggcttacggcttagacgggcactcggcttacaagtgggccatgtggcaccacaccgatagctgccgccggtcgtgatctcacttttttttgtttggttctactactttatagtcagcttacgtataagccgaatcgcccataaacgatgctcggcttacagcccgtaagctgatacaaattaagccgggtgtaacactccgcttacacattgccgagtttaaaatgctcttcactaagtatgattcattttttttctgtagtatggtgttataaagttaaaaaagagaaacttactttgtaaaaatttcacgctctttcctatgggtaaattctggctaaattatgtgtaatttaaatttgagtacaggtagcacgtcatcacatgcacacccatgtgtattgccactcgctgcaagtgcatttggtgtaccatgggtcagtaaaaagcagtgggagatggcgtattgcttggcggcctgatgctgggctccctgcctagatctgttcccctccggcagtgtcctagggttcttctagtgtaagggcggataccggccctcattgatctggccgttgacgtgttccggaaggctccacacgagatctccatttggtgcatagcgcctgtagattgttggattggatgggattcggtcttgtgtgcccctatttcagcccgtgtggtttcaggaagtcatgacgcgaagctttgttgtctactgacaattatgagacgtgttagtatcttgatttccatggtgaaggcagtggcagagaacgtcatggtggctgaggtgtgagccctagtaatggcggattgagtcttcgagggttgatgagttttcttggcgattcgtgnnnnnnnnnnnnnnnnnnnnnnnnnnnnnnnnnnnnnnnnacaggaggattacagagtattagctttcagggtgtaaacccaaggtttggccttaaatatttgtgcctcgcagtggcctcgttttgagagcacggattttcttcagggtgaaaacgaagttctatgatccggcgatgacggtgcttgtgcactattcctttttggaggcgtcgcttttggagaatctgtacttcgggtgttgtcttggtggtggttcatgcgacagttgcaaagaattgatcactgtagcgggatcnnnnnnnnnnnnnnnnnnnnnnnnnnnnnnnnnnnnnnnngtgcatctccaatgtctttaggacatttcgttgttgtagaggctgagttaatgggtatctccgcgacattaacatatttcctttgtcgagaaaaagcggctcaactactaaagagaggcaccaaaggagggagatatctatcccatatgcaagaggacgtaagttggctggtggtgcatgctcacttcgtagtatcacgtattgtgaatgccaccatgttcttagtttcacaacattatgcttattttctttaaataatcataaatgaatttccttgcagtactattatatgcccataaaaaggggatctcctcccttcagggacatctgacaaaaatcttatatttactaattggaggcaccataataggctccacgttaatccacatcatcaaaattaatttagccattagattataaatttaatgatcaagatttaatagaggacgctgcctcaataaccaaagaaaaagcatgtacgtacatgaataggactaagcccacacgtacaaaaaagttctcaacgcccacatctaagttagttgcaaagagaaaaaaacacg

SEQ ID NO: 6 - DNA, 29906 bp, Artificial Sequence
  Scaffold 1933170
gactcgtccagcaaggcccaacattggttttaccatttgccacctaagcctttttcccccgggttttcgcgagcccgagggtcatctttattttaacccccccccccccggaccagtgctccttcgagtgctggcccgaaccgggcagactgcggggccaccatggggcaactcgagggctggttttactcgtaggctgacctatccggtgtgccctgagaacgagatatgtgcagctcctatcgggatttgtcggcacagtcgggtggctttgctggtcttgttttattgctgtcgaaatgtcttgtagtccgggattccgagattgatcgggtcttcccggtagaaggaatatccttcgttgaccgtgagagcttataatgggctaagttgggacacccctgcagggtaatatctttcgaaagccgtgcccgcggttatgaggcagatgggaatttgttaatgtccggttgtagaaaacccgaagttgacctcaaataaaatacacatcaaccgcgtgtgtaaccgtgatggtctcttctcggcggagtccgggaagtgaacacggtgttggagttatgtctgacgtaagtagttcaggatcacttcttgatcgctactagcttcacgaccgtgctttgcttctctccttgctctcttttgcgaaatagccaccatatatgctagtcgcttgctgcagctccactttacaactctgtccttcctataagcttaaatagtcttgatctcgcgggtgtgagattgctgagtccccgtgactcacagattctaccaaaacagttgcaggttctgacgatgccagtgcaggtgacgcacccgagctcaagtgggagttcgacgaggaacgtggtcgttactatgtgtcttttcctgatgatcagtagtggtgcccagttgggacgatcggggatctgtgtagcatttggggtatcttcttttattttggttccgtagtcggaccttgagtgtactctgaatgatggatgtctatttatgtactgtgtgaagtggcgactgtaagccaactatgtatctctttcccttaattattacatgggttgtgtgaagattacctcacttgcgacattgctttcaatgcggttatgcctctaagtcgtgcctcgacacgtgggagatatagccgcatcgagggcgttacagcacggatgaatatatactgaatagttgttctattgacttcactatacatgggctaaatctgcagaaactttttttcttggccacagatagaagttatgcagaatctggatttgaacacctatatatattgcgaccatcaaaaagatttatcatatgtatatgaatatatgcaagataagagatggatttatgagaaaaaattacgctcatccaaatgatgaaaatcttgtcattttacatcatatagctatataaatggcaggcaaaacgaattgctctttatgaagctgaaggttgcccatctaagttccactgggtgatatgccggagagggcaattttatgtgcctagtagggtcctatacgtagtgtgagaagtgagaaccaacctttaggtgtgaaatctgttgtataagagaaagcaaaatgaaccacaaattccagacgccacaaatattatagatattatgattgttgctgaatggaacaccattatctagcatcgtagaccaagaggcctcctttccatgtctttaagtgatattagacagacataaggtttgattgaattatctatctgtgaaattatcaaaatctggaatattcttcggttcagctggctgattactgttattttttccataacaccatcttaattaactctaaaaatttcacagttataggaaataattcgatatcgattttattttaattcatccatgttggaccatatgagagtataactgaagatatagaaataagttgcagaatagaccaagtctcgaattccaagatggacaatataaaaatctcgaaaaaaagaacgcctactaagtacgtccttgatccttgcatacatgcaatctgtcccgatagttcctctattctgcagcttccttgactttgcagcttcaccaacaatggcggctagcggatatgaaaaaaattgacttcggtgcaccagcttctccaccgtagacaggtctgaaacccaaggatgcacatcagcaaaatctcacaaaactgaaaaccttggctgtacttgctgtttacagaccaagtcccaaattccaagatggacaacataaaaatctggaaaaacaaaacacctattccgcccttgttccttgcatacatgcaatctttcgccgtggttccacgattctacagcttccttgactttgcagcttcaccaacaatggtggctaaccgatctgaaacaaactgccttcggtgcaccatcttctccgccgtatcgtccatcgtgcattgttatttggtccaagcatgaaagctgagattggaaagacctcctcaggcaagaattgactgcagcgttgatgcaaaggttgcataggatggggcaggagcatgaacaccggagcccagaggaggaggaggagcagcgcttgcggagggtcgatggcacgtcggttgctcgggtgtgaaggattggcggaggaattagttaccatggggagtttgttagggagatattttctgaatcccttggagaagttttattatggagatatcttcttcatacgtagaagagtttttttatggtagtttttttcttctgatggaagcattacgtgaaaaggtttgctaaaagggtgcacgtggggcaagttgtgaggactctctaatatatctcatccgacggatataaatatgtaatatgaagatcgaatggaccaaattcttagttattgaggattaacgtggagcctcgattagtgcctccaattattaaatataagatattttctcatgccatgcttaagtagctaggagtatataatgacttatctcggatgtcaacgtgcattaaaatgattatgatgtagtatgatgatatggtatcctcctctaaatgtttcaagtggcttgacttggaacttgttcatgcatgtagttgaatcagaaccaacatagcctctacgatatttatattcatggtgttcatatcctactcatgatagtattcaatgtttattatgcataacacatgttcatgaccgtttttgctctctagctgaccgcttctcaacctacttgctagccttcgcctgtactaagcggaaatactatttgtgcatcaaaatcccaaaacccaaagttattccaaatgagtccaccatatctatctgtatgcggtattaccctgccattctaagtaaatttacatatgccacctctaaaatttcaaatgaacatctgttttgtgtgtgcctggattgttaatagagcgacagagggtagtcagtaccttccatgctaagcgggttattatcatgatgagtgtttattcacacgtccttgcacaagaggggcagtaaaagggattcccagtcccaaaatcaaaaatcacaaataattaaacaaatctccctcaagaatgttgttgctatggacggtacccatggattcggctagcctagagtgtgtttgttggtggagggggagtaaacctttacttttatcgtttggggaccgccactaatgtgtttagaatggaaaatatcgataactcttggtcgtgaagtaaacaggaaaggtgcgtttcccaaaattacatttatctctgtttcaaactctgagctctggcaccgttggaaatctctgcttccctgtgcaaagggacaatctaattaattttatgttggctcatcaccttctcaaataagcgccaatttttgagagcactattgtcatcctcacgcattgtgtgtagttaatgttggatgcatcatgactggatcctttctaccatgaattacaatgtttagtcgctgcttgaacttcggaggtgctctgcatttatgttttgcggtcccagaaagggctagcgagataccactgttgtcatttatatcatggtttttttgacaaagtgttgtcatttgggatatcttattattgctcgctagttgattatgccattgacatgagtcaatatagtttttaagtgttattgctgatatggttattcataatctttgcttaaaacatgggttctatttaagcttatttatgtaaacaagagcaatagagttcgtaaaagtttttctttttcactttgagtttgtcaactgaatttcttgaggacaagcaaaggtttaagcttgggggagttgatacgtatccgtcgtactttacctaaagcttttgctcttattttggactctaatttgcatggtttgaatgaaactaacccggactgacattgttttcagtagaactaccatggtgttgtttttgtgcagaaataaaagttcacggaatggaacaaaactttttggaaaataattttagaataaaagaaaaataccggagccaagaaccaccgggggcggggggggggggggggggggggggggggggggggctgagcacaacccaccagggcacgctcccctcctggtgcgcccaggtgggttgtgcccacctggtggccccacacaccctgatacggactccttaaatacctatatttggagaaaaaatcagggaggaagaattaacgcatttcacgagatggagccgctgccgccacctcatgttcttcatcgggaggccagatctagagtccgtttggggctccagagaggggaatcactacataagaaagacacatccatggcattttgggccaaacgaattttttttctatcatgcttatgacacttctatgatgataattatgacaaaacccggtatcatcataaatgtggtgggctcctacttctatgacaaaaaatcatgacaaaaaatgggcttttcgacctgggcgggccgaagacattctttgagctatccatgacgaaaaaaccgtggttgaagcgagggggaggaaaatatcggggagttcccggttaaggtgggtggtcggggccgagagatgcacggaggtttccgcatttctctcgtgtacgcgagtatgttcgaggcgtgggctaactgaacctgaccgatagatcccttggctattaattgaaccaaagtgattccttcgctgttgctgctaactgaacccatgcgatcgatcactgctgctgcttactgaagccgatcgagcccccgtgcgagacgtagccaaccggtgttgggttgcctctcgatgaacagtgactgttgctaccatgcgcgaggtacacagaacgagttgagacgtggtgagtcgagccggttggttggttgtggatgaacagttcccgatggggattcgatgaacatgaccccgtggtagtaggccgttgccgctgctacctcttgagcactgcgttggttttcccttgaagaggaaagggtgatgcagcaaagtagcgtaagtatttccctcagttttgagaaccaaggtatcaatccagtaggaggctcctcaaaagtctctcatatacctacacaaacaaacaagaacctcgcaacaaacgtgataaaggggttgtcaatcccttcacggaaacttgcaaaagtgagatctgatagagataataagataagataaatatttttggtatttttatgatatagattggaaagtaaaagatgcaaaataaaagatagatggaaaacttatatgataaaagatagacccgggggccataggtttcactagtggcttctctcaagatagcataagtattacggtgggtgaacaaattactgtcgagcaattgatagaaaagtgtgtagttatgagattatctaggcatgatcatgtatataggcatcacgtccacaacaagtagatcgaaacctcccccatgtaaatacccattgtacagtgtgcccattatttttaatatattaacacagtaggagcctttcctactattcatggtaaaaaaacaagtagatcgaaacgattctgcatctactactattactccacacatcgaccgactcctgcttgcatctagagtattaagttcataagaacagagtaacgcattaagaaagatgacatgatttagagggataaactcaagcaatatgatataaaccccatctttttatcctcgatggcaacaatacaatacgtgccttgctgcccctgctgtcactgggaaaggacaccgcaagattgaacccaaagctaagcacttctcctattgcaagaaagatcaatctagtaggccaaaccaaactgataattcgaacagacttgcaaagataaccaatcacacataaaagaattcagagaagattcaattatttctcatagataaacttgatcataaacccacaattcatcggatctcgacaaacacaccgcaataagagttacatcaaatagatctccaagaagatagaggagaacttggtattgagattcaaagagagagaagaagccatctagctaataactatggacccgaaggtctgtggtaaactactcacaactcatcagagaggccttggagatgatgtagaggccctccgtggtcgattccccctccggcgaagtgccattccaggctccaagatgggatctcgcggatacagaaggttgcggcggtggaattaggtttttgtggcgccccttgatgttttcagggtaggggagtatatataggcaaaagaagtaggtcggttgagccacgaggggcctacgagggtggggggcgcgcccacccccctagggcgcaccgggcaccctcgtggccacctcgtttgctgcttaacatccactccaagtctcctggtttgcatttgttccaaaaagatcgctcccgaaggtttcatcccgtttggactccgtttgatattcctttttcttcgaaacactgaaataggcaaaaaaaacaacaattcgggatgggcctccattagtaggttagtcccaaatatgatataaaagtgtaaagtaaagcccataaaaatccaaaacgggtaatataatagcatggaacaatcaaaaattacagatacattggagacgtatcagccgctggatgaacaggaccccgaggaggccgccgcacctcagccagttgggggtggatgaacaggaccccgtggaggctctatgaacagcagctggtggaggctggatgaacagtagccgtggatgaaaaatagcccgtggatgctggaggaggtcgaaggtggaatgaatagtagcccgtggaggctagagcgaggcagtagaggtggatgaacaggaccccgtttcaccatcggtgctccaagacaagtccgtttccttcgttttgtggtacaccatacccctcccgatcaacaagaccccgtttcaaccgtaggcacttgaacataagtttctttcctccgttttgttttatgccagacccttcccaatgaacaggaccccatatcgaccgtacacggtcgaacagaaggactgtttcctccattccgcggtacgccagacctcgcttcggttgttccgtccaagctggttggctccaaatgaaaatgacatattccgacccaatgggttgcctcccgatgaacacgatgctgtttcctccattctgacccacccggttggctgccagtgaacaagacgatgttgctgtacgccttcgagaccacgttcgtatgtgctacgtagccgtatttactttcttgcagtgtagttgtatgtatgtctacacgttatagacgggactgcctgacatgctatgtctgcggctctactacgacacgtgctactccttactcgaccacaattcattgctgcagagagaccgatcgaccagtatgtatgtacacgttcgcgaccaatccgacaacactacatacgcttcgaccgggtgggtcccagctgttccttgcgtgagaagatatagctggtgggtcccagttgtcagggagggatatttttttgtagtatggacgcacttccttgcgtgcgaagttgtagccggtgggtcccagttgtcagggggaaacatttttgtttcacgaaatatggtggcccgtccggtgggtccctgctgtcaggtggaggaatctttattttgcgcgtaataagaaggcacttccttgctgcggttgtggacccagctgtcagtctctccacctacagtactcttccgcaaagtcgttccttgaccacattgaccacgccgcaccgagagcaccaaggcggtcgacgacggcgaggcctaggaaggggacgatgcggagccggggaagagacgatagtggatgcccacgcggagaggagtacgagggttgtctggttcggctgtgatgtgatgccgccgtcgccgcaaaataacggggattgtgggtgactagagggatggcctggacagcatttggagtaggagggggcggtgagtcctacgcggcagcacagccgcccacgggaggcaggagcaagcggcaaggcccacgatggtttgggcggatggagcaagaagaccagaggttgaagaagcacggcagccgttggatcgccatcgtatggtaactgcacctagaatcgtttatattgactaagttgacaaagccctgcgtccgcatcaacttagtaggcccacaagtcaaccttcaaatatggtggatcccacctagctgtggggtctttattttttcgtgcgaaataaggaggcacttgtgtgcgaagagatatagctggtgggtccgagctgttagcggcgggaatgtttttttcgtgaaatatagaggcccttccggtgggtccctgctatcaggtggaggaatcattattttgcgcataataaggaggcacttccttgctgctgccatggacccaggtgccagcctctccacgtatagtcctcttcctacagaagtcgttccttgaccatgttgagcacgctgcgtcgagagcaccaaggcggggatgacggtgaggcctacgaagggaatgaccaggagccggggaagaattgatagttgtttcccacacggaggggagtacgagtgtttacttcttcggctgcagtgtgaggctgccatcgctggagaataacaggatgtttgggtgagtagagggatggctaggcaagctatgggagtatggtggggcggtgaggcctgcgtggcagcatagccggccgcgggaggagggagaaggcattcccgcaggcacttgtttgagtggctggagcagggggagcagagattgaagaagcacgacagccgttggatggacatccaacagtcactgctcacgcatgttgactaagttggcacggcgttgcatacgcgtcaacctttttgtaggaaagcgtatgcgtcaacctatagtaggcacacaagtcaacttcaagtatgtggaaaacaacatgcaacccatctgccattattttcaataatttacaacccatttgctaattcttaaggtttttttggagcccatattctttttgttagcattacagcccatattgtggccacggttaaaacattatacgaaattttgcatatttcagtgcggtccgaacgttttttaatcccgaaatttcgagtcacattcaaactaatttgaaaaataaattcatatcgatataaaatccaaataattgtccacgcataaaaatcaatggaatttaaaatctcgaaatgaaaataaataaatttgaaactaattgcctgtttgatgtgttttaaaaatgtagatcccatttctcattactggtatctcattttctcgtcttgaaagatttgcagcccagcagggctgacaaagcaagtaggcctcggttgtgtattcagcaaaagaacaaaaaaactggcctagccattttcagaaagaaaaaactactggggtggtcttgtggtaaacataaaagaaaaggatggctagacaggccagagtgcccaacacagcccagttgataccctgcttccgtcttaaaaacaaaaatatctgggcaagctaattccctaaaaaaattgggcaatctactgggtccctcgtgtcagccactcattgtgcaattctctcttttattgactacgttgacaatggcatggcacccagatgtcagaaatccattaggaggaaccatttttctggcttgaaataaggaggcaattgcttgcgtactgccatcaccctggtggatccctgctgtcatcctctccacgtacaatcatctcctgattgtgtatgcgtcaaggcccacaacttagcctctaaacatgtggcgaacaaatacaacccatttaaaaaaataacaacccattccataagttcacacggaaagttcaatattcagagcaaagtaacaggtctgatgagatatagagtactgaactcccactttaagaaccatcatagccaagttaactatctactcccactaagactctagtgtacacgtactgacttactcctagctaactagacgatgttagccgccatctgcggtacccgctaaaggccgacaccgatgtcctcctccttgcctcggacttgccggaggtgcgatagggcgcgttgctcgcgcgcgttggccctttccatgccggcatgctccactgaagcttcagcttctaagtgggaaacccacttgatgagctggtagtaaaattcggcgtcgtgcacgcgtgcgtgcctgacagcttctagggctatttgccgggcatcggctcccacatagtcggcccagtcgcgggcgctctgctcgcgactcaaagcagcggtgcgctgctgctccatgtcctgctggcggcggaaatcggtgatatgctactcctccgcgaggcggtcgcgctccaacaagttctcgtactccgcattgccatctaaagaccgatagaatgcctcctccctctctcttccttccggtgaataaccgaacactagctccagcggtgagcgcctctgccgtcgcctattgcagactgccgggagcatgacggacgtggcgagagcgagggcaattggcaagcgacatcgagccggtgggggttgtcaggggagccgatagggagagtcgggtgatggtgctaccgaagatcgctgggaaccagtaattataggcggaaggtaggtgaagcagcgtgtcacgggaaacgcgacggtcatcggaattcaatgcataagaaggcatggcttggtgcaccagcttaccgtggagaactggaaaaactgctgtggcatcccgtcccgtcagtgatgtgtcccgtccgtgctgggtcgcacatcggcatgatggttaaacgagtgcacttgaatcatcgagatgaggtactccctccttgtcaaaaattattccaccactcatcatctaccttggttggtgagatttttgaattgagccctgcaaactggaaaggaggtagtacgtgcgtgatccgctatttattcgtgtaggatcgagtaggtcggatagtgtatgtgtaggattgagtaggtcggatagtgttcctgtaggatcacattagctgatgaacgctcgctgggagataaggtatttgagaatgtttttgctggcagtttcttcagattcgcatggcattttctccagaacagcttgtaagtttcttcagatgtaggcatttttattcaaaaaactaccacctttggatcttgcgttgcaactaaaactaccaggagtgtattagtaggctagctagtgatcgataagtaacttgtaaacactgagcgaacagaaataagaaactgctagtaacttgtaaacactgagaacatagaaatcaggatcatgctgtgcatagtagtaagagccgatccgttcgaaatattcacacgagactcacaggcctggcattgtaatatgttcacattagtagaccaaattcagacaaactagtagcatgttaatgcatctcaatgattcacagatcatatacaaatatgtagctccaaaagcaaagatctagaaaaaacatctgctcttcccactaacatggatgcttctctgggccaacattcagtacagagtgaaagacaaatttggttgtgaactctataattcctcttgcaaacgtaagtggtttcacaaaaagctagaaccatgagaatgaaccacacatgatggaggaacatccactgcaatatgatttggtcttctctcgatcacatggcgagactatttttggaatacaaactttaacttcggcaaaatatgcccattgtataatctgaccaaagcaatgaagcacctagtgttggccaataaatagtacattactacttttgtgcagtccacaaagtgactatccaatctttttgtgtctattttcaaatggcactgcatgcagtgacttaactattctcttgtgcagttccaccaaaattgctgtcactttgtttgtttgtttgcgaaatagcaacgggcagacgtctatctgcaaaaatatcaaccagctagcaaacatataccccaccttgtattttcggtttaaacacgcctcttccgcttagcatctgtcatgttttgcactggacaatttgatactatcatgttttgccttggacaatttcatactgaattgatttgctagcacagagcagaaatatagcgcctattcttcatcagaccaaggatatccatgttcacagtgatggaagaggtgaaatcgatacaaccaaaattgagcttccaatcattgaatcatgtcctgcacctctaatgtaggtccaccctaacaataaattcacatgcaaaccactaatattactatctactgacaatacaaaacaagtagcaagatagtaaccatgtaccttcgtaatgaatagctcatagttccgccaattggatataaagttttggaagaaaacatgctcctaatgttgaaccatttggactttttgtgtagttccacatctctgtttgcatagatattgaaagtgtgattactataaaagtggcactagttgaagcaaagactcactaatataagcattcaaatttcttaatgggaaaaggtggcaagactgtttctaaccacctatttgaaagaataaataaggcaatagaagctgatgtcaggaaggcaaagctagtttttttcttaaaaattgaaacattcctgacttttcctcctctttcaaacatattttgtgcagttcaactaaaataaaatgccatcaccgccttgacaattcagtgacacggtaaaaaaagaaatgacttaacattacatcatgatgtcaggtatgtaatcgacatgcattagagacaaacatacatgcctccttcgataacataatgaacattaattttaacaaagatgtgattagatttatcgggataatttgagtgagctctacaccctctgttccttaatataatacattttcgcagttcaatttaaagtaggagtagttttcttgagcacatatctgggaaagcttgccacactttatatatgtccatacgctaatgcaacaccatccgaatagtacaaatatacactattccagtggctagtgcaatagtagagtagtttttttattacgaggtacagtacaatggttttactgaacagatttccataagctagcactggaagatttctataagcattagcaatacaaaatgtaaaggcaacaagtttcagcattggtatactagttgtgcaacagcattaaaccaaatacaaaagtgtgaaggtaactaggattattaactaatgacagtataaaattatttaaaccatgtaccttcaaggtaaatatcatttcaaactcgtagggacttgaaaaattgctatcccaatcttgataatcgatcaaacataaaaacttgatcgaacggaccaacagtacagctggaggaggaggtgcccacgcttgatatttcctcttctcttcgtaatattttgtgcagtttaaccaaaataaaatgacatcagcgccttggcattttggtgacactgtacaaaaaaattaacttatctcatgaaagtgaggtatgtaatctataagcattaacagtgcaaaaatctgaaggtagtaacaagtttcatcgttggtatactagctgtgcaacaacattagaatgccttagctgaaaaatctttaatacatccacaatcaacagctaaccctgaaataatccagtgatattaaatggcattgcttaaatttatcggtggcgttagactgagtgcggcattagttaaatgtgcatcactttagcagtagcattgcttgacattaccgctggcgttatactaacaacaaaatagtggcaataagggcatgggagccccattcggacagtgggcgcaccagtacgatgtacctccacggacgcatagagtggcgcctagagcaacaaatatccaggcagcatatgtggattacgtcccatttttgttctctttagccacctttttcctttgtaaggacaacaaaccgatcgagctggtcattctctattgcattgccatgcctttctaccctttttcaccctttttcaaccaacactactagggaaaaccctagcagcagcgcgggttttgagtgtagcagcagcgcgggtggccgctctactaataaggcgctacagctaacttgtagtagtagcgcggtccatacccgcgctactactgatgacgatatcagcagctcttttttccgaacgcgctgctattagttagctgtagcgatttcactgtccctcgctactgctatatctttcatcattttccctttcagtttccctttcagacactagatactaggtactgctactagatatcaaattcataaaccattactgggtagtactcccttcgttctaaattactcgtcgtggttttagttcaaaccacgacgagtgtaatttggaacgaagggagtactagatgcatagtcaatatgcatcctcaagcagtacaaggtcatatcaacggcgatcatcatatgtagttctagatgatatcaacgacaatcatcatatgtagttctagatgatatagccacacacacatatgtagttctagatgatataggcacacacacatatgtagttctagatgatatcgaagacaatcatcatcctcaagcctgggcggttggtgttcctgatagtaattaggatggcctgtccaacacgaagattcttgccagtcagtgtgtgcctgtgagtggatcggattttgtagtaaacttagcagtagcgcctattgcagaaatgcgctgctactacgcaccgtagcagtagctctcgtcgttataacgcgttgctgctataacttgcctcgtggcggcctcgtgggaattatagcagtagcgcttctttgggccggcacactactgctatatttatttcagcagcgagttaagctcgacctcgctactgctaattagcagcagcgccttattttaaagcgcgctgctgctaagattttgtttataggcttttccctagtagcgcaagagacacgagagtcgttccttagctactgatttccccttttgaacctagatgagagttcgatgcctagtctcttcgacattactttctcccttcctttccttattcaacccagacatggattagtctgcatgaagtagggtttccgttaatagtgcaaattaaggttttcatctgcgtgaccagtaaagtagaggatggcaaattgggaagaaggtggagtggaaaaagatccacatgcagcgacgtggcagatggggcaatagaacaagggtatggttcgaaaagaggtagcatacctgaggatcggcgagaagtggcttcgctcgtgggcgtcgtcctccgcacacactatggcggcgagcttggggatggaggccatcctgcgcgggcgctaggtctgagaggacggccttatcgtcagtgtgtgacctcgctcgccgtcgacgagtgcctcaacactgcacgtccttctcttccccggcggatttgtgaccatcggtgaggagggagagagaggccgtcttctttagatctggagagagtgtgatagtgtgagaagaaagtgggccgcccttatcaagcaagcgctgaagctccaccctatatatatatatatattttgatactagtactagaggtggagtagtggtagagtagtttatactttctctgcatacagtaccagttagtcgtgcttcaaactgaacggcacgccattaaaaaaataaagtcgagaaataatgcggcacctcgggccaacgtggccagatcgcattttgcacgagaaatgacacaccatgtttcgttgacatgtggtcctgttccaacatgttagtgagacgatggcgagtccttttgtacaatttccgaacggacgtcgatgtaggctggggcgcctgtttatcatggcaaccgtccactgcctcttcgcctttccctctcaatttggaactgctgtcccacgctcttcctccctcctccatttgccttcacccttccttctgccattgttcgatcgtcttctccatggagggaaaaggccggaaatgaccccgttattcttgccccgatctaaaagatgacgtggtggaggaactcattgattggtgcgacgtcatcacctcggctagcatcaactaataacatcattacaaagaaccccaagggtccaggagtggtttgatctcccctatcttcttcgccatgagcctgctcactggcccgcggacgacggaagcctcgccttgtgcaagttaatgccgcttgataatgatacgtgtgatgttaagatgccatcgctaaagggtaaggcctgggcaggcacaaatggagattgggttttttatattgggtacaattgcgattgggaacttgtgaatgtgtacactcatgagcggattccacttccaaaactctcagagtgtcctgaggttgagcacacaaatgatctatgtacgttcaaatacgatcatggtgactgtcatctacggaagatagcaatttgtcgagttcccaaccactcttgggattacataaactatgaagttgttgctatcttcgacaagcttgatgccatcattacttccaagccttgatggatatttctcaaaaattaatttatgtacactgatgagtactgtgatgcaattgaatacgagggtcttgtgtttgctaccaccacttgtggcactgttttttgcatggaatcattatggtttcggtacgtttgtcttccaccgtaattataattgtttcgtctacatgcatgcgggttagcaagtttccatttactaattaaccttcttgtttccaaggtcctatgaacattccaccacctatacttgaaaaattttataaccaagggggagatgatgatggtgatgatcacgagcatgaggacgagcaggacctatatactcagtggtgcctggcaacttaatccaatggatcacctcttcttatctgtatacagtgcactgctaatattactactagggataattagattgatgcccctagttgtgtcccactcgtctgttttacccctaattcccaaaagtcaccggttctgtccaagtcactttgctcctcttatgcttttgtcctttgaccgtttgaccgccagtttgaaaacttcataactaattcatactaaattagaaaaatgcaaataagatgccaaaatgttcagaaaaacatcacctatatgtcagtgtcatttgcattcatgaaagaagtgttgaaaagtgcacatatgagttttagctcttttgataccaccatgaatagtaaactctaaaaaagttccaaaaaataaaaaaaattggtggcaaagaatgacaaatgttttaagtgcctgccaagttttatcagggaataacattcgtgggtgccgcggcaaaaaaaaacaatcatctctcaaaatatattatttttttccacgacttccatgaatgtcgttccctaatgaaacttggcaagcacttagaacatttgtcgttctttgccaccatattttttttgaatttttttgaatttttttgaatttttatagagtttactattcatggtggtatcaaaagagctaaaactcagatgtgcacttttcaacacttatttcatgaatgcaaatgacactgacatataggtgatgtttatctgaacattttgatatcttatttgcattttgctgatttaatatgaattagttatgaagttttcaaactgacggtcaaacggtcaaacggcaaaagcataagaggagtaaattgacttggacagaaccggtgacttttgggaattaggggtaaaacagacgagtgggacacaattaggggcataaatctaattatcccttactactagggaagcaggtgttgtctcgaatggtcgcactctccagacctattacaacattcgttgtagggtattcgggatggatacttgtctactagcgccaacaccttctccctggtttagtattgatagtctaggagaaaactcgctcttcgtcggacaaaactatccaatgatggtgaaaggcgatctagttgctgttgacacaatgttactaccatttatgagaagcaattgtatctaaaccttggacattgcgttggttctctaccctggtcctgatataggccgcttcagtctggatgatcagtcctgcattggtctcgatattgacaatagctggtccttcccagaggcttacctatggttcaaagcaagcgtttccaatgctgaggattggttgagttgaagttcattttatttattgtgtgttgaaaactttagtatttactagaattttttgttggaaataatctataatccaacatgtatccttgttgtcgttgtgtgttgatgacttgttgtatgtaatgaatggtacatttgaaaatgcatgtcgtaaactcaacttatgaatggttttcgagtcacttcttggggtgtgagtaccatagtagtatagcgagcatccggttacatgaagttgccacatcacatagagccaacctaatattggagtacgctagcacaatagttagttctagttagaccaactagaggtaggtgtcgcatgaaggccgagaaatatggtgatagcatgactacgtgaggtgggcatgcatgtagtatgatgtaggcacagggcttgccgtgtttcctactcctccgatctaaatgtggagaagatttggtcgagttcttcctccttttgccgacacgtgggacatccagcatccaggtcgtgtcatgcaagaaaatggagtgctaattgaagccatgtgatgtgcatcttgggttaaattgtaaatagaatcttagtcttgagtaactccaaaagctgccaccaaagatctttattggatttgtttttcatcaccagtacatcaaggtgaaatatgtgcaggttcagtgggtcgtcttgcgttttcaccaacatgtgggaccgcatgtgagcaaataaatgatgggctccgcgtgtctgctggctggtgagaagagagagacaggagggctgagcacggactctaggaaatttcgtgacaatgtgagtagtactagtggtgtaccatactcctagagagatgatgtgttctctctgcataaccattacctcgatatagtggggtggcatgggccataactagcattcacgtctagcaatacggcacacgctacccacatgagtcccatctgacacaaattttcttggagtccgtgctacaaccatctcttctccctcctgttttctcagccatcgcacggtgggcggggtgggggtttgccgacagtcggtttgctcaactgcggtcccacttgtaagtgaaaatgcaacacaacacatattcccccttgagcggcgtgctggaccaaccgtgtgggggtgcgacgcgaacacgacatgcttttccttttgaactcgtaacttgtaaaatttagttccgctccatggcacgaccgatggatagaaataacgactttccttagagtaatgagaagtttggttctggcgcggttcatgaatgaagtactgatacgtctccaacgtatctataattttttttgttccatgctattttattatctgtattggatgttttatatgcattaatatgctattttgtattatttttgggactaacctattaaccgagagcccagtgccagtttctgtttttttgcctattttagagtttcatagaaaatgaataccaaacggagtccaaacggaatgaaactttcgcgaggatctttcttggaccagtagcaaaccaggagacttggagatgaagtcggagacacaacgaggcgcccacgagggtggagggtgcgccccctacctcatgggcccctcgtgggtctcctgacctagttccttcgcctatatatacacttataccctgaaaacattcaagggagccacgaaacctcttttccaccaccgtaaccttctgtacccatgagatcccatctagggacattttccggcgtcctgccggagggggattcgatcacggagggcttctacatcaataccattacccctctgatgaagcgtgagtagtttaccacagacctacgggtccatagctagtagctagatgacttcgtctctctctttgattctcaataccatgttctccttgatgttcttggagatctattcgatgtaatattcttttgcggtgtgtttgtcgagatccgatgaattgtggatttatgatcagattatatatgaatattatttggttcttctttgaattctcaagaggtagcaggaaggatttcttgcgccgttgccaaagagatctacgtcaggtcaagccataccaagtaaccatgataaactcttctctcttgcattacattattcgccatttgcctctccttttcctctccctcacttctaaaacgattttcgatttttttgcttttcctcgcccctcttccgttcgtcatttcgctttcttttttgtgtgcttgtgtgttggattgcttgctttgtcacgatggctcaagataataccaaattgtgtgacttttccaataccaacaacaatgattttattagcactctgattgctccgactaccaatgctgaatcttgtgaaattaatgctgctttgctgaatcatgttatgaaagatcaatttttgggccttcctagtgaagatgccgcatcccatctaaacaatttcgttgatttgtgtgatatgcaaagaagaaagatgtggataatgatattgctaaattgaagctatttccgttttcgcttagagatcgtgctaaaactttgttttcatctttacctaaaaataatattgattcatggaataagtgtaaatatgatttcatctctaagtattttcctcccgctaagatcatctctcttaggaacaatattatgaattttaagcaacttgatcatgagcatgttgcacaatcttgggagaggatgaaattgatgataagtaattgccctacacatggtttgaatttgtggatgattatacaaaattttcatgccggatttcattttgctcctagaaatcttttagattcggccgcatgaggcacttttatggaaatcactttaggagaggccactaagctgctagacaatatcatggttaattattctcaatggttaattattcccccgggcccccgagatctaggggccccctcccaggtgtagtgtacgtataaaggtaagtagcccattggccatagcttcacgtagaaaaaaggaagcagcccaggtccagaaaggaagggatggcagtacgcacgtaaatcggcgtacgattgtgaggaaacaaatcagcgtaacacacgtaaatcacgtcctttcattctgtttattccttcctatcgtgagacaatctccctccaaaataaaaacaatcgtgtgacgtgatttattccgtaatttcctatattctccgttctctgcaggctacaaaccctagttcccaagtcgcagagcctattgaaaataagcatcagagggctgattggtctcgaggcgctgtacgcgatgacgacgcagcaagaacatcgcctagccctgaaaattggcactgccggagtggggcgcacacgtatatggccaagtgtgtgccaccaaaaattcacatcacgtcatcgccgagcgtccaatgattgatgccgacctaatcaatttgaggtactgtatgtcatattactattccctattcccggcaaaaagaaaaatcactagtccctacagtttcaagtgccaaaataaaattcttgaagctgagaaggactttcacgttatatatctgttttctttggttgatatgaatcactgtgtttaaagatttattcggattactgtgcctgtgactgttccatcttagataaagaaaagcatttaaattttgaaattattattgaaccatttgggataaacaatgcctgaaagagcttaaatggttaggcaacattatgcatcgagaagtggatgacattgacttcgacatcgacacaatcataagtcactttacattgaagaatcttacaagaaaatttgaagataatatgcatttgatgtttatattaagggcccccaaattttacgttcgccccgggcccccaaaatctaaggaccggccctgtttggagttacataagtattcgagagttacagattactatagactgttctgtttttgacagattctatttttcgcgtgttgtttgcttattttgatgaatctgttggtagtatcggggtggtatgaaccatggaaaagttggaataaagtagatattacaccaatataagtaaagaatgagtttgcaatagtaacttaaagtggtgatttattttcttatactaacggagctcatgagattttctgttgagttttgtgttgtgaagttttcaagttttgggtaaggatttgatggactacggaataaggagtggcaagagcctaagcttgggtatgcccaaggcaccacaaggtaacattcaaggacaaccaaaatcctaagcttggggatgcccgggaaggcatcccctctttcgtcttcgtctagcggtaatttcacttgaggctatatttttattcaccacatgatatgtgtttttcttggagcgtcttgtatgatttgagtctttgctttttagtttaccacaatcatccttgctgtacacaccttttgggagagacacacatgaatcgtgatttattagaatactctacatgcttcacttatatcttttgagctaggcaatattgctctagtacttcacttatatctttttagagcacggcggtagctttattttatagaaattgtcgaactctcgtgcttcacttatattattttgagagtcttttagaacagcgtggtaatttgctttggttataaatttagtcctaatatgatgggcatccaagagggatataataaaaactttcatatgaagtgcattgaatactatgagaagtttgattctttatgattgttttgagatatgaagatggtgatgttagagtgatgctagtggagtagttgtgaatttgggagatacttgtgttaaagtttttgattccattagcatgcacgtatggtgaaccgttatgtgatgaagttggagcatgatttatttattgattgtcttccttatgagtggcggtcggggacgagcgatggtcttttcctaccaatctaccccctaggagcatgcgcgtagtactttgttttgataactaatagatttttgcaataagtatgtgagttctttatgactaatgttgagtccatggattatacgcactctcacccttccaccattgctagcctctctagtatcgcgcaactttcaccggtagcatacacccaccatataccttcctcaaaacagccaccatacctacctattatggcatttccatagccattccaagatatattgccatgcagctttccaccgttccgtttattatgaaacgctccatcattgtcatattgctttgcatgatcatgtagttgacactttatttgtggcaaagccaccattcataattctttcatacattttactcttgaatcattgcacataccgttacatcactggaggcattcacatagagtcatattttgttctaagcattgagttgtaattcttgagttgtaagtaaataaaagtgtgatgatcttcattattagagcattgtcccatgtgaggaaaggatgatttttttttgagaatcaccgagggggagtttccccacctgaatatattacccaaagtgcccaaatgccagaatagtgatccagtttaaaaggaaaaccgaatcgaaaaacttaacaaattgaccccgtttataaggaaaaccgggccgaaaaccgtacaaggcatgtcgggggagaactgatcgtgtcccacgagcacctacgggacctgggtcccttgtggttcggaggggggcagagattgcacaaagagcggatcgaggcgatgcacacgagcggatttacccagcttcggagctctccagagagataatactcctactgctgctttgtggattatcttgtgttcttgctagggagcaatgggagctacaagacctagcctgagtgtggtttcgtatgaatgtgatgaactaagccggagatggaccgaacccagccgaaccctttctacgttgcacttgggcctccttttataggcgcaaggggtcaccacatgtggcaagtagacaaggttataatggtaaaaacataggttggtacaccgctttgtacagtgtacagtaatctatacctaactctgacggcaagggacaagagtcatcaatgcccgtctcagtcgcccgaacagtgtaacagggaccgtcaagtgcgcctccgttcgccacgatggtagcttgtcagcgccgcttgtcgctactccccgctggctgcatagcccatcgacacgcgtacttgggagagccccgtggtgacacgttggcgggtgagctggagcggagatgaagagaggtcgcccgccccggcaagcgccttgccgcggcaggaaccttgtcgcacttgggggctcggcgcccgccaagccttcccggcaagctcctcttgccggggccttgtttccttcgcgccctgagtggccttcccgacaagctcctcttgccggggtcttgactactttgttcttgaatggctcaaaggagccgctgaggaccttggcggccatcaggccagccctgccgtggggcgctgcaactgtccgtgcacgagttcggggtactagggtacccctactctagtacaccgacaggagcccccgggcctgggccacacacggcgccaagctctgttgggccaggcccaaaacaatgcacgggcacgcgtggtcttgattacgccgttatttgccttggacccaccacgtctcccacgaacggcacgcaccggacgtggcgtcgtgggggagatcgtggggctttctttaatgggaaaaatcggaacgcccgtcccctctcccctttataagcaggggaaccggggcaggactcccacttgcccttgctgtcacgtcggaaacccccgtcgctttcccctttcttatgtcgggggagaactgattgtgtcccacgagcacctacgggacctgggtcccttgtgattcggaggggggcggagattgcacaaagagcggatcgaggcgatgcacacgagcggatttacccagcttcggagctctccggagagataatactcctactgctgctttgtggattatcttgtgttcttgctagggagcaatgggagctacaagacctagcctgagtgtggtttcgtatgcatgtgatgaactaagtcggagctggaccgaacccagccgaaccctttctacgttgcatttgggcctccttttataggcgcaaggggtcaccacatgtggcaagtagacaaggttataatggtaaaaacataggttggtacaccgctttgtacagtgtacagtaatctatacctaactctgacggcaagggacaagagtcatcaatgcccgtctcagtcgcccgaacagtgtaacagggaccgtcaagtgcgcctccgttcaccatgatggtagcttgtcagcgcctcttgtcgctactccccgctggctgcacagcccgtcgacacgcgtacttgggagagccccgtggtgacacgttggcgggtgagctggagcggagatgaagagaggtcgcccgccccggcaagcgccttgccgcggcaggaaccttgtcgcgcttgggggctcggcgcccgccaagccttcccggcaagctcctcttgccggggccttgtttccttcgtgccctgagtggccttcccggcaagctcctcttgccggggtcttgactactttgttcttgaatggctcaaaggagccgctgaggaccttggcggccatcaggccagccctgccgtggggcgctgcaactgtccgtgcacgagttcggggtactagggtacccctactctagtacaccgacaaggcatgaccaggctggcagacataggaccatcgccatgagaggcacaagtacaagagggtgtcatcaagagatcacaataccaggacactgcaaacagccgagcgcatcggcgggcaaaccggccccatggcacaactcaagagcaaccacaatcaacgagtgtcatcccagacacgaaccttgactgggctccaccacagaaaagcggaacaattagcagtttgagatcttgcgccatccttttgcaaagatgagtcgagacaagaccaagagcatgaagctcgccgcaacacaacagtagccatgggagggtcttgagcaaccattaccaacctggaccgcacgggaacaacaccaacgtagacgaagagctccaatcaatcgagaccatccatgatgcctcaatgctattggtgcagccgaagggcatcgagcgaccgagtccagacccatatgaagagccacacgcagcggagtctacatcacaacagcggcaccgccggcgaaaccgaagggcatcaaggagccgagtctacacccggattgtttcgccatgcacaccagcgccagccggccacaccaccaccaccgtccaaaccgcagtgagtagccaccacacaatccaccaagctgatgccttcaagaaggaatgcgacgcgaagagcgccgccatcggccgttccggacggaccaggaacatgggtttccccaggagcctcgaaggggaagtcaccatgacagcgatgcctccaaggaggtaagcggcacccgcgggcgtcaccatcgccggctccgacaggagcagtggctttctcccaagtaagtagaccacctccgagagatccgttagactgcgattcgctgctccctgcaccaccacggagtaatgggcactgcagcccgccgctgcacgtgaccaaagctgatcgaccaccacaccatgcatccaccacaaagccaccgtcgaccccttatccggccgcagcacgaccaacatccgccacactccaccgccgcccccatgggtcatcttttaccgcgaaagtcatggtctccaagacaacgcctccaaggaggtagcggtgccacaggcgccgtcgtcgcccgatttggcaaaactagaccttgggattacgcccgaagataccggactcgaggagaacgacaacaaaatggcgccgccgttactggcatcaatcaaagttttgcaaggttttcacctggagccaggcaagtccgcatcacctcaaaatccaaagacttggcacacctccgaccgcagcagcaggccccgagaggggagaggagcaccttaggaccacactgggagtgggggccgccaccccgccctaacccgccgagcagggctcctgggccgaagccagagcaaccaactacagccgcagcaccgctgagagaggcctggcgagcagccagtagccgacgtccgagtccccacttgccagatccacgcgctagtagccgcggcgcaccgccaaccgccaaccgccatgccgtccctgccagatcccgacgaggggcaacaaggccgcacgcgccgccacactcctcgtcgcgccagcaccacctggctgcgcccgctcgcgcaccgcgcgctgccaccccacgctggctcgccgcgtcgccccgaacgccagcgcgcccgagctcccaccggggcggccggcccacgccgcgccatcccgagcgggaggagtaagcggggcacgagagcacatcaccaacctgccgcgaggaccgccgcccttcccaccgtgccggagcacgaacgacgcgtgcgtggaggagcgccgcaccgccgccgccacacgactccccctcccgcatacgagccgctccggcgcgccatggccccgccgccgcctgatccacgtgggggctttgcccggctgaggctgacgggtggcggcaagggggagggaaggcggggggggggggggggccgctgtggtcggtagatttaccgccgctcgagtcgccctgggaaggacgacgcaggggcttgagtcgtgaggaaaggatgatggagactatgattcccccacaagtcaggatgagactccagacaaaaaataaaataaaataaagagtccattaaaaaagagaagacccaaataaataaaataaaataaaatgagagaaaaagagacaaggggcaatgttactatcctttttccacacttgggcttcaaagtagcaccttgatcttcatgatagagagtttcctattttgtcactttcatatactagtgggaattttcataatagaacttggcttgtatattccaatgatgggcgtcctccaaatgcccaaggtcttcatgagcaagcgagttggacgcacacccacttagtttctttttgagctttcatacacttatagctctagtgcatatgttccatgacaatcccaactgactcacattgatatctattgatgggcatctccatagcccgttgatacgcctattttatgtgagactatcttctcctttttgtcttccccacaaccaccatattctattccaccttagtgctatatccatagctcacgctcatgtattgcatcaaggttggaaaagtttgagaacatcgaaagtttgaaacaattgcttggctcgtcatcagggttgtgcatgcatgatttaaatattttatgtgatgaagagagcatagccagactatatgattttgtagggatagctttctttggctatgttattttgagaagacatgattgctttgttagtatacttgaagcattattgtttttatgtcaatattaaatttttcttttgaatcttttatatatgaacattcatgccacaataaagaaaattacatggacaaatatgttaggtagcattgcacatcaagaattctgtttttatcatttacctactcgaggacgagcaagaattaagcttggggatgcttgacacgtctccaacgtatctataattttttattgttccatgctattatattatctgttttggatgttttatatgcattaatatgctattttatattatttttgggactaacctattaaccaagagccgagtgccagttctgattttttgcctaatttagagtttcgtagaaaaggaatatcaaacggagtccaaacggaatgaaactttcgcgatgatctttcttggaccagaagcaaaccaggagacttggagatgaagtcggagacgcgacgagatggccacgagggtggagggcgtgcccctacctcgtgtgcccctcgtgggtctgctgacctagttcctttgcatata

SEQ ID NO: 7 - DNA, 16584 bp, Artificial Sequence
  Scaffold 1531163
tatatatatatatatgtttgtgtgtgtgtgtgtgcgcgcgcgttttggcatttgaaacgcgaagaaacattatgtaggagttaatcaatgcaattatgtgcaaccctttatgacttcatttgcttattttttttgagctattagaccctgaaattgaaaagaactacaaatgaactctggaaaggctgaaacttggcatgttattatcatttcacccatatagcaagtgctaaaaagttgagaggcttacgacaaaaactggatgcactttgtatacaaactagacaatctctttcgatgtataaggttttcgcacgaaaactcatatgttacaaatgaatttcatttttttaacttattttaactccagactttttgtgcgttcaacatgcaccattcaaagccacatcatcaatttttaacactttctgagttcatttgctattttttcgtgcatttaaagattttttttctagctaaatgatcttgaaatttaaaatcactacaaatgaactctgaaaaggttgaaacttggcatggtatcatcatttcacccacataacatgtgctaaaaagtagagagggttacgtcataaactggatgcacttcgtggtcaaactggacaatctctttcggagtataagggtttaaactcatatgttacaaaggcatttcttttttttaaacttattttaactccagactttttgtgtcttcaacatgcattattgaaagctatatcatcaattttcaaccctttctgacttcatttgctatttttcatgcttttaatgatttttttcatctataaaacaacacataatctgtttttgattaaaacgcccatttaaaataacctaaaaattatcaaactgatttataatgattaaaacacactaatattaaactgcaggaaaaagaatcactcaaaaatatatttttaatgtaaattcacaaactagtaattcacaaaattttcaaataactctaatttaaactattcaaagttgaaaactactaacattaacgaaaagtttataatttttgtgacctaaagcaaaaagattaactcaaaaaatctagatatttagctgtaagtagaaacaaaagaaaaagaaaataaagaaaaaatatatgaaaaaagaccggacctaaaagaaataaaaaaatattgcctactaggccaccacggccggcatacgactggaatcccaacacactagttggccaggatgtaggcccgcagaaggccaagtaggcccacaagaagatagtgcagttttaggcccgtaggcctgttttggagaggagctcgaggtggtagcagcaacagcgcttataaaccactccgagctcttctcagctagcgaggtgggactaagcatctgcccttagaaaaaaattgaaacacttctctagttttccccgacgacgacgaagcagagcatgacaccgctaggctgccggacccctccgtcgcttccccaagcccgctcctcgtcgccgcccccaatgtcgtcctcgttccctgccccgacgttgtccccgagcccgctcgctcctcgtcgctggccgaacctccttgagcatcgcgtcgtgcccccgtgagccgcacaaccagctcgtcaccggtcggacctcgtcgctgactatcctcgtctgctgctagccttcatgagcttctaagtgagccagtagctacaattccaggactgatgggtttgtgataatatgtcaggacaagaaaatacagtgggaaacacgacaacactaggcatctctcagctcttatacatatttgtttcatatttttgtgggttcagtttttagtttttactgatagttcaggaaaaaagaagatgcggaagaatgagatgtccatgctaagaaaagaaaacaagtaattttcagctccactacatattgctattatgagactataagaggaagagccagttcatcaagcatgatttgtggtgccaacacaggatttacgaaaagtaacctccacccacacgcaaggctaatgcacaaccaattttcaagacataataagtactattaaaatggcctaaattttttagcatatactaataccatcccacagctacttgaaacagtgcaatgaatgctgcacgttgtaaaactatgtaacctcaacaagagcaatataaacgacatcgaaagggcaaaaggcagaccttgcaagattatctttgagcgccgggaatatgggaggccaaaccatcaaaaaagggtagacaacactgaaacgccgacccttttctgctgttccatgtagtttacacagtgtcctgctcgtgacgtccagatagagcatgcaaccacacattttcaagaacacaaactcagcattatgcccgacctgtcatagatagggaacaccaatatgctcaagcgtgggatctagcatcctcatattagcacacatctcacgtaagcaaatggtatggacctgcaactagttgtcacctttgtggagcaagatgcaaagttgatgctcactgatatgttcatgggtgagatatacaccagaagtatcatcggcctgagacaaggtggtgctaaaagggtgatacatcactctgtgtgggagtggaattctggataaacatggggtcactaaatccatgacaataatttcatcactgaaggcggccagcgtatagattttgctgccgacgagctcagcttttggtgcccttagcggaagaaggatttggtctgtggctgagctttgcatgcaccagacgcgtcttgcaacatatatacggtcatcctgaaatttcttgtccccctgatccattcggccaacacatacaggtaagacaagccttcttcttcttctttggagaggattgcactgagaatttgttgcatgggttcctgggctcttggaagtgatgggacggcacccatgcctctatcagcgcacagagggctatgcgcctcaagtgccaatctgtttgaattgcggtgcatggtgaagacggtgccattcctgcagaatatgatctgttcatggacagcgaagccgtggcttgtcatgcggcgtacgatggaagcgaactctgggggctggggtagcattgggacgaagcgtggtgcggcgggctcgtccggccagaccgaccctacatcaatgtagaatccaaggagccagggtgggtagcgctcacagaaacaacggaggaagccgacgacggagacgtggtggtaccatcgcttgcaaacagggctagcacgtatgaaggtggtggggaagccgacacggaggagtatctcgatgaggaggtcatcgtcgcccaacaccttggatacggcggctgccatccacactgatagacaatagttaaggcccatatacaatggagagtagccgactataccgaccaagtagtccgcaaaattgttttgttacactcctcccaaaaaaataaatagttttgtcacacgtggagccaacttaaaagcaacccagcgtcaaaaaaaaacttaatagcaaccctgccatttttctttgacgggccaggcctaatcgcaggtttgttttgggcttaccaccatggactctccagattttgactcagtagacaatctgaagaagcctgtacaaaattcgggtgctgctccatggcgacaccgagcgcggcaaaaagcttcaacacagcactacagcccaacaaagctccattgcacccccggcaaccccggccgtgctccattgcggccccgacgacctcagcgggcgcttcaatgcagtaccggcggccacagcagtgcttcagtgcagcatcggcgacgcccccgggaagctccattgcagcctcggcggcgcccaattgcaacccaagtggcgccctcggtgctccattgcagctccggcggcactccattgcaaccgcatcgaaagtttcaatgacccggacccactccattgcagcctcgggttgcttctagcaatcggaatgctgcaccgttggagacttgcaccagaatgttgtgtgtgggtggtgggtcggccgcctgcagcggtgactgctaccctacaaacaccatcatgcgcgaagggtggccagagggggaatatgaaacaagaggcactgaggcactaggctggccgaccaaactgtacattgttccaaatgggatgttagaaattcgaatttatgcatgcactcacttttatttctcagtttgtatatgcccctctcttttatatctcagtttgtatggctcgagcttttctgttttcctttttcagaaaattgctcccttgtttttgaatggtgctccctttccttttctaaagatcaatccatttaaatgtaagacatactctctccgtcttgaattaactgttgatgaaatcagtgagtctacacattagaacacgtctagaaacacttgtttcagcaacaattaattcaggattgaggtgatacatactagcgaagaaaattatatataacctatggggaacggagaccgggatttagtcagacatgtccaacatgggagtgaagacagacgggggcgcgacaaaatcattcatggaaaaagccaagtggcgagggtttttggcggtgtttgcgaaagcaaagaaggatgtatgggtcggcgaggatgcaacaccatcatgtttagatgtgggaagcgcggggagagaagatggaggagctggacgagaataaatctgagttagggtttgactgcatcggtagagtcgacgcgtaaaggaataacaatttgttttgctagtccacttcattctaatgatgtggacgttgccaaaggagatttagacccattacaaagaagggaaatgaatgtttgtccatataatgtttgagaaagaaatgccttccatcaaaaggacaagtcaataaaactgtcatttatcaaagaaatcaatgcagcggagatgatgaagcaatctaccacgcattgatccaaacagttcttgagatcgtgggtaaattaggttttgggataaagcttggattcacaaatttgtcttcctacttctccattccatcttacaacatattttgtgctcagtttgctttcgaatataattattagtactattttgcatccactgtacttattgcatgtgataaggttcaacttgtgaacaagtattgaatagaagacgagttcaagcattgagtaagtgaagataaacctaggaggtgagacactttgtccttcccccacgtcactcccgccggggctactcgggagacaattagataaggtagccgctacctcctataccccatccctcaatcctcgcccttgtctgagaagcccaacagaaagcatgtggcacctcccaggacggcgaatctcctctgttgcatcatcggtgtgggccatcacagggcattgttaggtgtagcatctcgatctgtggcccagtgtgtgaagtggatgcttggcagcgccgccaacaacttgtccaggtgatccagatcttggcatgcctagcctaaacattgcgtgtgtggctggtgtagcaataatggaagagggcccagtaggtgcagtgcggtctcagttacggtcgctggagcagtgcctccggcatggaagacgtggctaggtgcttctgttatgcaagtggcggtacgataagtggcgaccgcgagcacgttgcgatctgtatggtcctaatgactcacaagaatagcggatcgcaacaatctttgagggtagcatttcacaaaaaaatatttatttgacactaggggaggtaaagaatatttgcaagccttagcaattgagttgtcaatttaacaacacctgaaaaatcacttccttgcagcaacttattagcagcaacgtaatatgatagtagtgatggcaaagtaatagtagaggtagcagtagtagtaacagatttgtaaccagcagagtagtagtaacttgagcaaaggcaataatattaaagagtgggcatggagtagcgatggatatttagatgagattcaatatgtaataatcacaaccgagagcatacacatagctccaattcatcaatcatatctaggcatgtattcagtatatagtcatacacgcttgcagtaagaacttgcatggcatattttgtcctaccctcaggtggcagtgaggtcctaatggaaagtaagggtaatgaagataatccttttcatacagaaccggaactaagcactaacacatggtgaatacatgaactcctcaagttaaagtcaccccggtcaatatcccaatcattgtcaccttggtgtctaaggtccagaatgataaactggtgcatacaacttgcaggtaagatcaagaacgcaaatatattcatgaaagtataacatgttaagatctgaaattgtggctctcgggctctagtgacaaacattaagcatagcaaagccatagcaacatcactctcaaaacatattggacacaagagatcaagccctaaaaaattgacatgattaattatgaaatctcatccatctcagttaaaaaaatgccatccatcgtcatatatctcgagtatgcctacaaaggattactcacacatgattatgagcattgaaattgttgatggagaagggttggtgatggccacgacgaatccctctctccggagccatgaacagactccagagcagggctctcgacgaagaacatgaggtggcgctgattccatatcataaaacacaatggaattttgtctccaattttattttatggaagacataatatatatcgtcggaattaggccaggaagaggtccaggggacccataagcctgtcctgcgggccctggtggtaggagtgccccctgggcttgtgggtcaggctgggccccctccgacacttgttgctccagtatttttcagttattccaaaataacttgtcgtaaagtttcgcccaattccgagaatttttaatttctgcacacacacaaaataccctggtaggtctactgaaaacaacgtcaatccgtattagtttcactgaaatcatgcaaactatagaccaaaacaagagtagaactggttgcaaaatagatatgttggagacctatcttgtcctgtgagggacaatattatctaggcggccgcacccagagttgtgacggtagtgaaagtcgttggccttgtggttgttctggcggtctggctgacgctcggtgagtggttgatgcagcgccgcgtgaagatcctactgccaatcattagccaggctggacgatgatcagaaccgccggcgcaccttccttcttcaacgtgtcctgcttgctccactgctcagtgaaactctaggggaaacccttgatcttcacaaaatgatgaaactacatgcgagggttttcggcggtgttgtggattggcaatcagacggataatgggcaaggcgagctttgtaacacgttctattcttcacgaatgaaaagcaacgttgattgctttttttcgaaaaaagggtaaacctagcactagaacaacaacaactaacacgaagttgcacgtggtagatttgatagaaaacatgctgctgctatgctttgtaatatgttaacttcctcatggatgaaatgcaatgttgattgcattttctcaaacaaggggtaatcctaggactagaacaacagacagatttgatcaaaaacatgcttttggagctttggttggttcataccgtgtaggcgcacccatcattagaaaggcttaataacggtgaaataaaatgggaagagaaaaatgggaaaccatcattgagttggtaagagtagcagctagcaaatgcaattagccctatcatttatccaacctagctactagcgtcctattagtactacaggtttgaatgcaccacaaccattgcatgtttcagaccagagtcgaggactacatacatgtgagagtcctcgttcatcatataaaggaaccaattaccaatgttcctctccactcctctatctttgtgtcaaaactctctactgtcctagttaatacacaccacaaaaactataaaagaaactcggtgacatggtgtaggtctccatgtctctacaggggagaaccttatagagtctataagcatgggaggcacgagggaagaaacagtcccatgtggttctgagccctttggaaagggcttcaagatgtgtaccccaatccttcttccagcagaacaatcaaccttcatatcccgtatagatagttctaagtgatttcccttctacatgtatcttccatgtctagcagggcaagcaaatttcacgccctatattctatctcatatattttcttaatatcctgtgactccatccagaaagtttatataacaagcaattcacacaataaacagttcacacgtacggcagcccataacataaattaagaatacagatgggtcatatgtagctatcaattggacccatctacataaagttgagttaaatctcggttacattaaataacgcggtaacaatatcggctcttaaacattcagatcctcaccctcataatctctagaagattaccattgcattacagctacacataatcaccaactaaaatttctaattagcgatcaggaacaagggacttctactagtgccataacaacaagcagatgagacaagacaaagctactcgacatatacaggttggtgttcttacttcccaaccaccaaatgaataatgatctctacgcacgcagtaattgtgacggtaccgcagcttatccagtccagtagacagtataaccagcttgtgatccactctaaaaccgataacgaaatacaaaactgcccttggctacgaacacacacagttaggagctagtactagcaaagacaggtgaatatcatcaagaatcagctgctcggaaagacatcccatccgacaaacgcctcgacggaggagaatgacctcctctaggtttttcaaattctacttttgttagatgcgaagtgacagcctttgatttcaggagctggtttcttctcctctctgactttgaaaaaacaaccgtctgaatatagtgtgggaacatctaatgattcaaaatgcgcaagtaatatttaacagactggcaatgcatggctaagtgatttatttcagggtttaacaacaatgggattggttcaagttcagaactgcaatttgttcgggttcagtatcatggttcatgttgcattacgtgatggaattatccagtgtgttacaaatgtcagaataagcaacgattattcagggaattggatgatgaaattattcagaaaattaggtgaccgaatggttaatgttgcagcagccgtcaggttcagcaatatcattgattccaggttgttatattagatagagtccaatgaacaaaacagatatgtctactgaaatttttatggtatcacaaccgatacttgtccttcagaaaattcaatgtctatcaccaactaacatcaggcaagtgcttcttacgaaataagtaaattttaaccaccaacttatgttgtctttaaaggaaactgctcaccaaaaacagactcaccaacaaaaatagcgggaccactctaatagacaagtcaaaatgatcaagaaaagctgtaaaagactgagaatgacttgaaaatatccttgaaaaagtatctctgatagaaacatgaatacagagtgattttcacaacaaatatagtaaaagagcacctcctgatctagtccaaaattatgctatctaacaaacaaaaattccagagcatgaacatgatcttgataggagcatgaacatgacatggttctcacaacacaatatagcaaaagagcaccacctaatccagtacaaaattttgcattagaataaacatgggatcgatcagctctacagaggaatgcaactagcttctctgtttgttttcctgcttgctaccttgcatcgaaaacatcaagcaattaatcaaattctagtaaagtgaatcccacttgcagtttgttcaattcagtgaagtgtcaaactaagtacgagatgcaaaagtgtttcaaagtactgatttaattagtactgagtttctgcaaacaccatacatagcaatcaagcacaccaaccacaagactctgacacaagtggatatgagacggatagcaactaaatatgcatgcagcaagtcatgtgcatgaaacaaaaatcttggtcacaaacagtcatggtacataggataggagtacttgctctggttacatagcaactaaggaaatgcagctccctgttcttcctgatcgccggccatccaaaagattgatgatatccccttcatatggcatttctgttcccaagaaaacagaggaaatatcaggatgaaggtaatttagcatcagaatatttttctgccactttatgcatcaaaatttaattgaactaagataattggctggtacaactatacaaaaaccgtgtgcttggaaatcgaataatgaatctgctaaacagtttacttttttttcttccaaaaatgctacaacagtacaggttcaatggcatcatatcccagactaaaatgattccaatttgtaatctgcattccagttacagcagaactctgatcatataaggaagatgccacacaaacacaaattacccactattagtttggaatagaaacttgccaattgtcatacgaaaggaattttttgactgttcatatctgaatcacaaagcatgcataagctcaagcatacccacataaaagttatgatccactagtgctccagaaaacatgtacgactcgtgcagcaacattcgggaagaaaaaacaagtattgaaatctcatagataccttgggtttaacagcccaaaggtaggcactagaaaacaaggtgatgattatgtttatgaaataggaaactaaattctaggcttgatgggatcatactgtttcaagaaaagaaaaatattgttgccaacatggtaacgaggctatgcattttcctgctcttacttcatttacctgcgctgatagttcaaaaaacagtgctacaacagagcgtgaggtccatgctaatgttggtttttgatcgctagaccaaaactcccagtaagctcaggccaacgtgcaaagctagcttcgaagatagcaagcaggcagcttgattgatcttcaggaatagtgcacacgtctaggaacgtacgtacacgaacttggtttgactagctatgacaggatcgatctctcgtttcggcggagccaacggaaaaactgaacgatgtattttttgatttccgcatgggcgtgtcgctcctggactttttccctttattgcttctatggtctaatcagattacacggggggtacattgtatatatactactaagctaggcctaaaccaaaccgactaggactagctatcctacatggatacctagacacacacggacacggggttacctcacagctaagaacacgaaaaagaaatcatttttcagtaccatcacaaactgacattatgagactttataagggggtggcacgttcgagaagcattatgtttggttccataacaaagcttccaaaataaaacacaaccaagggtccaatattatgaccacaataaacactaagccagtaagtgattgcaaatcattgcaccgcaagcattatctaatgtcagttaactagtactgttaaaatagcctaaagaatcaaccatacataaccatcaactttcgacagcagtacctaacaatgcaatggatcatgcacataaaaaaatgtctctaacctcgacaagggtacaaaaagataaacgtcataggatcatacttgagtgtaggaaatgtgggaggccaaatcatcatgaaaggatagatatcaccaaaacgtcgatccttttcttccaggtcatacactttacgaagtttcttgtacttgatatccaagtggagtgtgcatcgacccatctccaagaaaacaaactcgtcataatcccccacatggtttatctggagaggagcagtagcctcattctcatcctcgcaccctgtcatcctcaaaccagcaaccatctcacgcaaacaaatattttgcacgagcaaccagttgtcccccttgtggagccaaatgcaaagttgaagcttcttggcatggatgaaatacacaccagaagcattattggcccgtgccaacgtggtgtctttgtcaccatactccaccccttgtgggagcagaatcgtggagatgcttgagcccatcaaatccaggacaacaatgtcgctctgggcgctcgctaaatagattttatcgttggcgagcacagcttttggatcaaatcgcggacaaaggaaacggtcgatggccaggtcaagatgtctgcgccatacagtgtcaccattttgcagaacatcaatgtgcacaatagatttggtcctctccgttgtagactccaccagcacataaatgtaggacaagccatcgccttcctctttggggaggaggagatcattcataacacaaaaatagccatcctgaatttgcaactctgggaatggcgggaggaccaccagacctctctcggggtgcaacgggctgtgcactctaactgtaaaatctctgccatcgtacaagctgatgaggatgttgccgttccggcagcccatgatgtcggacatttcactccggtggtcgtccaagctgaatctcgctgtgcggacgacagtggcaagctctgctggctgaggcagcatcggaaagaagcgtgctgccacagttggttcatccgtgtcctcaaggtagaagccgaggaggtgggatgggttgcgctcgtggaaacggctgaggaacttgcaatcggaggcgtggtggtaccaacgcttgcatacaagggaggcgcagacgagggtgctcgggaagccgacgcaaaggatgatctctctgaggaggttgtcgtcatcgagcaccttggagaccacatccacgtctgtcgtcagggaatggtgttgtgactcgccatgcccatcggcgcatggtttcatctcctgattatccctggaaaattgacaagaacgaacaagtgaaaaagcagagtcaatgcaatggactaatttattcagtgggcagcaaaacatccaaccacctagcggtacttatatatagaaacaaagggcaggaactgaaagagtacattcaatcaagattaatttcttcaattgtgagcgtgaaagcaatgggaaaattttctttagctgtgttgcaaaacagttaactggagacatgttggagggttcagaacacccatccatccagcaggacgaaattgagagattggagggcctcaccgtggggggatcacctccacagcatccattgcctatcttcctttccgcctcggctgtgcaacgcactgaacaagtagagtagatgcaggtagggtttagattggggacaaaactgtagtgtagcaagctagggttcgattccacgagaagagaagagaaaagaaactgaaagagtagtgggaggagaagaactcacatcgatcgaatcgggagaacggggagaagggccgccgccgggcacaagtctgggtgaagtcgccggaggtctggtgaatttgccgtgagaaaccgatgcatcgccttcgtcctgcgccttagcctggcaatgaagccccatccgagtccagcccaactgaacatgtgacgagggaaaagaaggcccgccatataacaactccccttgtaaaagaaaaataaaatatgcctaaaaaatagttttttctcaacaacgtaccccctgcaacaaaatgttatgcttgggtgtagaacaacacatacattggtgaattgcactcgtatacatgtgtaaaaggaaaaacaccgtcgattgcaaaactaaaatgaaaggaaaaaaatagagcaacatcattctcaaaaaaaaaatgttacatagatagagtggttctcaggagacaagtatatcaaagcaccataccatgatcctggcggctctactgtaagcgtttttcttccctaaccctaggccgctagggaaaaaaatcttccctccaaacttcataggtgatcccgtggattcgcctcccctctacctgcctctccgacggccagtgaagggaaggagaatcccggtgcctccgctccagttagtagtttagtttaggaatttttttagtcctcacaggtgaggtgctcgggtcgatggcggcgctacgtctttgagtttgtcttccagctccgatcctccttgagttcgtccatctggatgtagtcaacggagctccggcgtagattcctgtcgtctcattggggtggtgaggttagggtttctcgtattgtggcgaggattgatgtcagctggttcagatctatgcaatggttcaacggcgatgactgtcgctccagggcgctggccattaggggcacgtgcacgaagaccttccggctgtcatcgacaaggtcaagccggctccggtaggagagcggcgacatcggcgcatcggcggctcgttatggcgatagtactggttgtttggggttcttagtatctcaatgtaatattatgttcgagatgttttgtactcctcgtgaaatttgataatagatctggattattttcgcaaaaaaagcacaccatgaccctattacatagcatcccaatccactacaaaattccatgaatagaacaaatccattttgaaattgaccatcttccaaaaaaacacaaacaacccacttgtggtttccttaattaatcttggggccatgaattccactcgtagttttcagtttgtagtttgcattcctatactaaggaaatcttacggtccatggagaaatgacatgatcgccatcatgtcagatgcgtgttggggaaagagttgatggcggcgagggagaagaggggacatctctacacacaagagatccattaacaagttttttatttgatggagggacatattgcccattcttcaaccgcagaatgctccccgtagtaaacttcagatcaactgcgccaacaccacgaacaaaagcatttgaaccattgcacgtcaatacgatggaagtccctatggcttgataagaagaaaatatagaaatatcactgcatacatattggcacccgcgtcaatcgaccaatcatgagaatgacatactgaaaggataatgggaaatataccgtacccaacatcattcatcccagtgtcaccaatgataacattggcggtcttgacacctttcccatgtggatgcttgtcataacagttgggaaaactaggagcccaatgatcagggtctccgcatacatgacaagcacccgtcttcttatcattcttcatcaaagttttcctttaccatgaaaattgcccttgtttgtggggttagtgttagaatatataaccgtattatgtgtatagatatacggttgtatatgtgtagtctttgtataggtgtccgtatattgtacgatacgaactctgccttgtaacctctatatattgatcaatacaaggcaccacaacgtgtggtttccccaatcttacatggtatagagcctaaaaccctaaccctagcctgtgccgccctcctcctctttccgctgccaccgaagccaccacccctctcgccgccgcgcccagatcgccgcctccatgtcgcaacctgacgcggacgccacgaaccaggcgctggccgcggccaaggagcgccaggacgccgaggccgccaaggccaagctacctctcgcaaccgcccctgatggatctgggacgagcacggtgtctttttccttgacctctctgcacgcccaggccgtcggcctgcactccatcaagggacacgttcccgtcgaactcgcgcttgacaccggcgttcaccgtcagtggtgcaccttctttcgcgccgcttgccgcaagtacgccctcctggatcatctcgactttgacgcccccgacgcgccgaacccggagtggtctctcctcgacgccaccgtcgtctcttggctctatgggtctgtctcgctcagcatcctcgacgccgtcatgacgcccggtgacgatcccctcgccgtcgatctctggaacagcatcaacggtctcttcagcgaccacaagatcaatcgtcagctccacctcacggccgagctcggcgatctcaagatgggagagatgaccatggccgactaccttcagaaggtcaaatccctctccgatgggcttgcggatcttggcgcccccgttgatgatgctgagatggtggtccactacctcaacggcctctccgagcaatacgaggccgccgctgatctcatctccctcatgctgggcatgaccttcgcgcagtgcggctcgttgctcgcgctccaggacatgaagcgcaaaaatcgccgcgcctgcaactccgacacggccctcttcaccaacaccgctggcaaccctggcaacaccggcaacccgggcaaggcctctggaaaaggaaagaagaagaagaaggctgccactggcgtcgccaaggagatcatcccggcgcccgcgaccccgttggctgccactccc

SEQ ID NO: 8 - DNA, 61472 bp, Artificial Sequence
  Scaffold 1927703
gacgaaccgggaccaatggcccacgtggcccggccggccccctgggctcacgaaccggggcaaatagctccattggtcccggttctggattgaaccgggactaatgggctaaactgccctggacgatagcccctttttctactagtgcatggccacgtgggtgtcatgctggttgatgttcagcgtagcatgtcggtggtgcaatagggactctagggtctggcggtaccctggtttggcagaggggtgtgtgcaccagagtgcataacttgcccagttttccaggccaatgaggacagcggccacatccgccttttccttcatgaaggctctattgcggttgcttcctccccttcatgttgctccgggtgaaaacttgatctttgggatcgggcgatggtgccactccagtgttatgcccttcttaaaggatccgccttggagtccatgctatgtcattgtctaacttcacttatttgcgatggctagctcacgggaggtctccgtcggctcaagcagttcattttggctcatctttgcttcctggtcgattgggcagtgttgcggtgcatcagcactcttgtatcttgtcttgggtgtatgtgttggtggtgtgtcgtttgcgggtgcttgtgcctctgatcgttgctttatatatatataccagggcgaatgcctttttggtatattacaattacatgattttggactatgacaaacctttgaacctacatcatagttcgtggcaatgtcgaactagaagaaagaaaaaatgcctaactgaacaaaggaggaagaggaagaaggtaaggtcatctagatcaccaaacgaaccttatcatatggtcatggacatgctcggacgatgttcgtggacagcccgttcatcgaacagtgtccatcaaattcgaactatgggctatgattgatagtgggcaatgcagacctagagcagaaaatatgagtaatagacatgggttgtggagagacgtgttcaaactaaaagtggattgggcctacgttcgggcttcatgagagcttgggagcaactaattgggggttacccttggctgggtgttcggatgggcagtttctagtgttgccatgtgtcacactagatgcttcccttttagagtatagattcaactgtttttcgggggtacattttttcttgttttcctttttccctttttgggtttttttacgtttccttttttatatgtcaggggcgtcgggtcacatgggagcacacgtactccttccgtttccaaatataagtctgtttagagatttcaataaagactacatacggatgtaggcatctcttagagtatagattcactaattttgctttgtatgtagtccgcgttgaaatatctaaaaaagacctacatttagaatcgaatagagtatgcttcttccttaaaaaaaatactaagatagcagattcagagtgccacagacagttaaacacagtctattgtacggggtgtttttacctctgtctatagttgaggtggggtgtcgttacagacaaccgttgtctagctagcgcctgtcgttgcaattaactcgcagagttaactaggagtaaggagcgctgccgagtaacatcacaattagtagcgcatgtacgggcgagatgtgcaaaaccagcctagctagctatagctgcaaagtcgatccattgatcggttcgtcgaacattgaaagggaaattgacttgggtacggtcgagggtcatcagtcgcattgaacgagaaatcgattgaagacgacgacgacgacggagcctgcaagatgcacgcacgccgttgcaaccatgctcgctggcgatgttcccatatgtggcatgcggacgtacacgaatgcaatcgtacgtgaccgcctgtgtgaccactgaccaacacggccagccaacatcaacacacagatatgtaaacgtctcgtcctgatctgccgacgatgatgatgatatagggtgagtgtctggttctgggtggtcagacggtacgtagagctagcactgcctagtgcgccgtacactggcacatgtacagatagcaagccagccagttagctgcgacgacgccacgatagacgaccttctgagccatacaaagactcgaccaatcgccgagtcgtgcgtaggcgtcgagttgatctttctgtataaatgttgtggctacagtacacgtagcagtaacgcataaccgtatacaatgttttggaagcactgtaagagcatctacaaccgtacctctcaaattcgcctcatacgccctggcaggctacccggtcgctatccggtcacgattttttgatccagacggacctctcaaatggtcctcaaacgcctgggttgactggcaccccccatatccagcccaaatatgaggcggatatgaggtcgcccgggcacgcccgtcacgttggacccgacaacccgacgccaccccaaattgcaccaaatccccccccccctcctccccgagctgtcagatccattcactctctcctctgttcttccttctctgcgccggccagctcgcagctctaccgccgcgcccgctccgcagccgttcccaggctctccgccgccagctccggaagatcgctcccgtcctcgccgcggggggacgttgtcgccggcctggagaccaccgtggtacgtccgacaactctccggctgcgccttgtgcttgatgtgttcgacacattgaccgacggaattgttgtgattttgttaggtaaatgatggattccgatgcttcgttgaacgaggagtatggacggattgagcttgaccaaatgattcaagatgatttctttgattcgtcgcattcggacgaagaagtggacatgatcatgcatgctcatgagcatgcaagaggaaatggaccggcaagtggagcatattctcaacttcaacggctcaatcaaagggagaagagtgatcaaccgggacagagtgtccggagcaaagctactgcataatgactactttgctcccacacctactttccgggatgatccatggtttcgtcgcccttttcgcatgcgaaaaccattgttttgcgcattgtggagggagtggaggcacacgacaactacttcaagttgagaagagattgttgtagccaactctctttctcggccaagcagaagtgcacagctgctctgaggatgcttgcacttggtactgctgcagacgccgttggtgagatggtcgggatgggggagagcacgtgcgtcaagactactgtcaaatttgctcgcgctgtggttgaggtgtttggaccagagtatctcagagaaccaaatgcgcagggcacatggagaagttgttggccattggagaggcaagggggtttccatcggatcaattgattgcatgcatggacaatggaaaaactgccccaaaggtctgcggggaatgatcaaggtcacaccagagaggccaccattatactagaaatgctggcatcacatgacttatggatttggcatgctttctttggaatgctcggttctcacaacgacatcaacgttcttcaacgatctccggtgttcaggaggctttgcaatgaggaatcaccgccgtgcaactacatcgtcaacgcccgggactacaacatggggtactatcttgctgatggtatctatcctcagtgggcggcgtttgtgaagataatatccgagctgtgtggcaataaacagagccgctttgcaacaatgcaggaagcggctaggtaggacgtggagagggcatttggtgtgcttcaagctcgttggggaattgtgcagagcgctgcaatgatgtgggaatcagaaactttgtggcagttgatgacatgttctgttattctgcacaatatgattgtcgaggatgagggtgatggtctagtccaaacccatgatttcgaagcacccggagaacaagttgaaatttcagaagatcaagatgcggctcaggttatgaactttctatagatgcatcggaatcttcgaaatcagaaggtgcacacacatctattcaatgatcttgtggagcacaagtggatccacaatggcaaccaaggaggcaatgcttgactttggcgcttcaaataaattttatataaacggtatgtatgcttgataccaacaattgcaatttacgtgtgacattgtgttgcatgatcgacgtgtatgtatttgtatggattcgagagtccggttttgagatatgtaaatgcacggaaggaaatatgagggccggtccggatgcccacgggcgtgcccggacatgtccgcgggcgtttgaggggctaagagggtgtttggatactctctagttatgtgactagtagtagtcagactagaagtttttagtcaggccctgtttggaaggtgactactactagtcagcattaaatgtctcagtattaaatgtcccttgtgcaacaccaattagaggagatagagggggactttagtcagtaaaagtcaggggtgtttggaggtttactgactaaaggtgactactactagtctctctagtcagtaaaaattgggggtggggtgactagggactaaactagttttagtcacccactagtcaggggtgtttggaggtttacggactaaaggtgactactactagtctctagtctctagtctctagtgatccaaacaccctctaccaagtccgactgtaaatgctataacacacgtgtacgtcgaccggtacatggtcctctgcgcatggtaacggcctaatggtggatgaattcagagcatgtcgacctagctagggcgctcaaaatccatgtcccaatccagcatgtcgaccaagagaatactgtacttatcagtcaacttgattacttgattacttaaccagagcgcgagcacctgcgcacagcgtgcaactgcagtcgcactagtactcctctcgtgtagggggcaacacaatgtatccggacgatacgtacgaacaggttccactaaggcaatcgctaggcgccagcgcgtcggccgaacgtttcaaccagtccagtgccagctgttcgatctgactaacacggaggctacagaaccgctcgatctctgcttgtgatcaggcgagctcgcatggactaggtcatcgtcttcctcacccttgcgaatcccccactcctccttccccgcccgactcactacccacccacctgcgcgccgccgcacctcctcccctgctgccgcctcgctgtcgtctccgccggtcgccgccttcgccgttggtcgccgccctcacctatgtcgccttcgtcgtttctcatctccgtggatgcagcaacgtgcgtccatggttgcagccttgtaatccggtggcaccgctcgcaaccctagtgcacgacgaccacactccagtgccgactgttcgccggacacagcaccccgacggcgagctcacaaaaaaagcagcatctctcctcgggttgctgccggtagtaacaaaattgtccacctgtcgaagcaaaatcaagtactggttgaagcttttcgcacatatgattcaagctttctctgtcaaacggttgcaactttttaaattctgcagagtctggttgtagctaatccatgaacagatgtagcaaaaatgccgccgccgtcgtcgcacgtcacatctaagctgtgaagcatgtagcaaataatgaccccggcagtaacaaaaaaccgataacggttgcagcaaaatatcatcgccgctgacccgagtcgcagctaattgatccgtacatggttgtagcaaaaaagctcgccggtggtagcttcaaccatagccggttgcagcaaaaaaaaatcgtcgccgccgtcgaggttgcatcatcatcatgaaggatgtagcaaatgccatctccggtggtagcaattgcaaacatcggtagtagcaaaaacttatgcggttgctgtaatactatgtcgccgccgtcgcgggtcatgccctcgccgtatttgcttgtagcaaattatgccatgggtcgcagctccttcatcacctggttccagcacctcacaccaacggccgcaacacccccccccccccccccccccccccccccccccccccccgcgacttcagttgaatcagtttcacgccgggccgcgcaccagtgtcgtccgagctcatcgtttgtagcggtcatggttgcacttgcacgcagacgttttccaccctgcactgtcaacgaatggaccatggatgcgcaagtgtgtgtgcctagggatggagcagtttgggggagggtcctctagcggtgagcagagctagggccgacgagggccatggcggaggagcgtgagcagctgcttgcagtgaggaagacgaaggcacgtggtggggagacgaggaaagttactggatggataataaagtgattgtgggcccgtaagaaaagggttggttggctatgcgcaaaagtgggcgacgccgctggcgtgcgacgaatccgcgtgcgaccggctgagcgctttggccggcacaccggctctaaacgtttcccttccacttaaggagtagtactactaccactaatggcaagagagaccgtggcagttggatcgagcacgccccacaatctgtgggagcagcggcagttgccggtttgcatatttctgcgcacagcgcacccgctcaacatgtggccagaatgtgtggtctcgtttgtggcagcgtatgcgcttctgtatgcgccacacaaatcaaattaagcaaggatcaaaaaaatttaagcaagagggcacgcatctcgctgcctaggggaacggcgcagttgcctcgcgtacttgctcgatctactagttgtttttgtccttttattaccctcatctttactttttcccgctctagatgtgttctttagttgcctgaaaattcaaattgcatcagtagatttcgcatgagaagaaagaaactcagctcatgttttttttctctcgttttttattaccttcaggttagacggagcaccagcttgaggcggggacgccgccagtggcggaactagcatcagattacgcctagggctatattagcttgagtgatgcccttcagtgattttatatattttataagaaggaattacaaaggctaatgtagctaggcctagggctatagccccaactgccctaggcctgtctccgccactggacgccgcgattcccaacaagggagaaatcaggtccattctttgaggaagaagttaaacagtgttgactaaactcgtttgtccagaaatgaaaaggtaaataggctaaagggaaatttggcaaacttacatgataatggacaaaacctctaatgtatgataatggacataacctctaattcgagaggtatgtaacaacaacgaactcactgttccctcaggcatacaccttggggatcatgtagccttcacatatatcctcctttgttggccctatagtattcaattcggagcgcagaattacgtaaaaaatatcatgaccactaaattgatcgtagttgttttaattttgaaaaaaatagtaaaaaggagtaatgtttttttttcgagaatgaccggggcggggagggagggggcattgtgccccaccggttgttatattactcgtacgactttgcaatacagtgtttttcatcaaaaagattaaaaaaacatgatgagatgtggaaaaaaaacaaagcaatctgttaacaagctaggagaccgaaagaatatatgccacgagtgaaagttatttctattatatagaaactaaaaatgtgtgccacgagtgcacgttatcacaagtgaatatatttaagattttttttgtataatttaaaagtactcataattatgctaaattaaaaaaaacatacatctgactatatttctgttttatggaaactaagaatatatgccatgaatgaaagttaccacaactgaatattaataaaatgtttgtgctcataatttttataacttaaatataacccatgaggtattcttttttacatttactaaaaaattcataattttatatttactaaatattttaatattatctaaatataaataagtatcttttagaaaattaaatgaacattttttaaataagttattttatttctacgtctaatatttataacaaaagtatgacaaataaatattaatttatttttattactttgattataatttacaaatttcttaaaaaaaacaaacatgttcaaacgggttgtacggactgcaacccatgtaaaaccctaacgtgccccaacacaaggtattaagggtcattattgttggttgacaagaaaattttaatagcgaagtggctggcagtatgtcaggtgggtctcacgtcatgtgtgtatgctaatcaaaatacgatgtcatatcggcacattataagtctatggataagattatcaccgtatttgcaagctcatgccaagttttagaaccaattcgatcaatttttcaagtttagtcactaaagtgaacatcgatgttaagtttagccaccatcggtgatattacgtcggaaataaaaaggaaagaggtaatattatccgtagtcatagaacttgcgtcgcatgttcagtttgatgctagaactttgaaaatacgattttgtagtcatctaacttaactctgagcgtgcatatacggtcatagtaagtgtatgtaagtgtatccatgtgtgtggacccacatgttagtgagtgatgcagctggacatgacgtatttttatggagaactactgggatgtatttttgcacaaaaccccgtcatattttttatttacataaataatccgaccacaatactggcattatatgcgaaaatttacaaaaaaaatagtactctaggactcgaacgcacaaccaactggtttaacacggaacactctagccactaaaggtacacgcatgtggagcttaaatattttataaacctgagtattatataaactagtgtgttatataaatgtgtctattacatatttggttttcaaaattattattcaaaaaattattttaattacacaaatatttcaataattacatgcacatttttatagttcaatgtttgtataattaaaaatattcttaatatgaattttaactgttaacatgggcattcaatcatggttaatatttaatttatatatatacatgttttgaataaaattcaagagtaaaaattatacacaagtgaatattcataaatatttaataaatgtttgtattcaccattttgtataattttaatataagccgcaagtgtatatcttttggattcattaaacatatttatttaacaaaaaaatgatgcatgtattaactaaacatatttcatataatacatatgtttatatttaaatgtttttattcactaaccatggtttgtatggatagtatttttaacagtcagatattggaacataattttattacttatgttttaccaatataatgaatgtatttattacttttttttactaaatactccctccgtcccaaaataagtgtcttatccttagtacaacttcatactaaatctagtacaaagttgagacacttattttgggatggagagggtattttatatatgatgcacatgtttgtatttaaatgtttttatttactaatcatcgtctgtatgtaagatatatttttacacacaaaatatttgaacataaatttagtacttacgttttacaaatatattaaaataatagcgcatgcaaaatggtccgcaatataggcaatccatttgagctccatatttttttctcaaaaaataataataatcaagctccacacgcgttccctttaagtccatataagtttgttatcagtgcatagacatacagacatgtgcggtgtagtggctttaccatgccgttttaaaacagttcgtcgtatttttgttctcaactttcgggcatataatggcagtagtgtggttggattttcctataaataaaaatctcaaggatttttgtgcaaatatgtgtcgtgctgggaaactacaaaaatatgagtgtattttttttgtgaaaatgtcgaggggatttgtgcaaaatatgtgtcgcgccgggcaactacaaaaatataagggtgttttttgtcgcccctagtgccatcactcactaacaaaatgggagcatacacatgaatacgcctgcaaaagcgtattgtgaccttatctgcacacttgagtcaagttagatgaccaaaaaactatatttttaaaattctagcaccaaaatgaatattcaacgtaagttttatgaccccggatgatattacctcaaaaggaaactgactccatagaggttccataggacatatactgtggtcaaagaagtgctagctcaattatgttgcaacttgcaaaatcaaggggccgtccgttcgaaggaagcgatcgagtagtcgcgcgcgttgaacagaagaggactatcttgatcggggaagacgacgacgctgactttgccaccggccggcaactgagcgtgatatttccgtatgcggcaatacttacgttttttagaaaaagaggatgaccccggcctctgtatttgaatgatgcatacggtcattttattaattattctcacaagacctgacaaagtaatacaacagtaagactaaagtcgccgtctaagcaacaaatgctgttccacctatccagttgatgaaggggtgcagatagcctgggcctaataccaaatagacatcgcagccaaacctaacatctaagacctgaggtcccatcgaggatgcctgctgggcatgggtcacaccggtccggtgtgcactcagaggccgccgtcgccaactgccaccgctccatcttcagaactgtactgatgcatcaaccttgctcggtccagctatcgtcgacgccaccacggcgcccaacggcacctcctccctgcgcgcaaacagctgagcacgtcgcggtcgccactgatacacctcagcatcatgcaaccaagtaccatcagccgacacaacttgaagtctttaaaagatctgtcgtgcgtagcacctgccgaccaggcatgacaaagcgtagcaccattcggtcaagcatgacatgacatctccaccaaagctccacagcttgagcacgtcgcggcaatgctcacgtacacgtgagtgcaatttgcgtgacgtgtcactagtacttccacttgccagccaactaaaaacattaacatacctgtggtacatccggcggcagaacagctaggtagcttcccgttgattatagctagcgatagtcgttgattataggcagctagtttctcgaaaaaagaaaaattatagctagcgatagtcgttgcaacttgcagagtaacttcctagagcacccgcaaaaaacttcttatcgcacggcacgtacgagcaagagatgcaaaaccagcctagctagctgcaaagtcgatcgattcgtcgatatccactccatctgtatcaatatataaaatataagacgtttttataggttattctacataggtagcagaacattacagcgagtttgacttgggcacgatgagtatcatcaatcagtcgcattgaacgagaaaccgatggaagacgaccatgatggagcctgcaggacgccgacgtgtcgattcgtgcggcgtggaccatgcacgcacgcacgccattgcaaccatgctcgtctgcgatatttccatatgcggcatgcgcacgtacacgtatgcaatcgtacgtgagtgtgtgtgaccactgaccaacaccgccagccaacgtcaacgcacagatataaacgtgtcgtcctaatctaccaacggtgatgatgtgggtggccggtgagacggcagcggtagcactgcctggtgcgtacaccggcacctgtaccgataggagttaattacatggaagtaccacaattagtgcattacatgtagattggtatcacttttcgtaatttttacatgtcaatattacgtttggggttagccgttacaaaaagatctaaatctcgtataaacacgtattgacagtgtatctgactgacgggcgtcagtcccgcccgtcgggtgcttatgtggtagtttttttgcagaaacccccctagctttgtatgtaatacccattttttcgcgggaaaagctactgagaggtttttttttcgttcgcaagtttccacggactagtttgaaagtttccggcgaatgaaataaataaataatagaaagcttcgaacccacgacctgtcgtcgaaccgttgcacgcgctagccaaaatgccacctcaccgctgacgatgagatgcaggcgaaagccttattatactagactacatacgctgggccggcggctaggccaagcgaggctctttcgctgaggcgctcaagccactatcgcgaaacgggccggcacactagtgtccctcaaccagttttctttctgtttttttttcttttaaccggttttccggttttccctgtttctttttttctttttcccttgttttgtttctatttcttcttctgtttctgtttattttattttattttatcctttttcgtttttatttttgtactttgttttcaagaaaactttttgaaatcccaaattttgatcatgatttcgaaactgttcatggttccaatttttgttcacattttgaaaaatgtggtcacaattgaaacaaaatcccaaatttagatctttttgccacgatcgacgtcacgacattctaagccatacatagaatcgaccaatcgtgatacgtatagcgttgatctttctactctacctgcatgcatgttctggctacagtacacgttgtagtaacgtacaatcatatacacagtgttttcgaagcaatgtaacgcacgtcggcgggtacgtacgtggtcgtctgctcatggtcatcaactaatggtggatgaattcagaacatgtggacctagcaagcgcgctcaaaatccatgtcccgatcgagcatgtcgaccaagagaagactgtagttattagtcaacttgattactcgattatttaaccgagtgtgactaggtctcagtctatcgagacttgattaaatctcagtcaaatgatatactgcataagaagaagaaaccttgtatgaatctccatacaagatcaaaaaaatatagaatcgactgagacataacaaagtctcagtctgagaattagcaatcccgtatttaaccaagtaagtcctgagtgccagcacctgtacacagcatgctcttgcagttgtgctggtcctccaatcgtgtaggtggcaacataatgtatctggacgtacgtacgaacaggtttcacttaaggagtagtactactaccaccagtggtaagagagaccgtgacagttggaccagcgtcaagttgatgatttgcatgtgctgcgcacagcgtaccggctcaacgacatgtggccagaatgtgtggtctcaattgtggcagcatatgtgcttttgtatgcgccacataaatcaaattaaggatggaggcttagtttttgggaggtgctcataaagataggatgtgcgtatgtacgttcatagggtgagtgtatgcgcgtgtatatgagcgcttacgtctgtactgtgttcaagaaaaattaagcaaggagaacacggcaccgttgcctcgcatacttgcccgatctactagttgtttttggcatattacttcactcatctttactttttcccgcactcgacgtgttctcagcagttgcctgaaaattcaaattgcattagtagattttggatgagaagagagaaaccccgagccggagagggggaggcaaagacaggacctcgcaggaaccggcaacatgatagccagagggaagtaaaggcatctccaacgccgaccctcaaacggccacatgcgtttggatcgtgttattcggaccgtcgaagccatcaacgtgggcatgtatcggtctgtagtgcggtctgaatgtacattctcctgtaaactggggataaacgtggggtgctttgcaggcgccaggaccgctcccaagcccgtttctgaccacactggcccacccaaaacccctacccacccctacagtgcttttcattccacgccccgcgctgcttgccgcgccgcattcatgtcgggccagagcatgcagcgcccggcattgatgtcgtgatttgaccgaacgggcaggcggtgcaagcggacgcgacctctcggccgctccgccacattgaagaaggctaaccgcccctcagcctggcctggtcgcggctagttaagctgcgctcctgcgctgtacaaatccgcacccctccctcctccagagcaccacgccatcctcctccccatcaccgagcacttcctcctcttcgagctctttctcctttccgagccgagcagtaatgccgaagtcccggttctcctcatcggcaggctgcaccggtgggagttagtcgttaggcggatcatggcgtcgctgccctcgctcacctggaccatccgcatccacgatggcagtctcctccggcgacgaggaggaccagccgcagtagcggccccgtctcctctcggaggcggctctgacgaacggagaattcgtccgtcagatggagatcatgacggagcgttcgcttcgtcagatgggtccggcaccaccatcgttggcgtgtgttggaggagccaccatcccaccacgggtccgcattaagcaggagccggcatccctagtccggcaggtgaaggataagccgacgtccctgccgtgcaaccgcgacatcgacatcggcaatcgtatgaagcaggagaaggtgtcatagcaagcgcactcaaaatccatgtcccgatcgaatatgtcgaccaagaggagactgtagttattagtcaacttgattgcttgattactcatactcccttcgtccaaaaaacttgtcctaagtttattcctcaaagggatgtatctaccactaatttgatgttaaatacatttatttaagggacaagcttattcggatgaagggcgtatgtccaaactccacagcgcgagcacctgcgcatagcatgctcgtgcaactgcagtcacgctaggactcctctcgtgtagggggcaactcaatgtatctggacgtacgtacgaacaggttccacttaaggagtagtactactaccattagtggtatgaccgtgaaagttgaatcgagcacggcccacaatttgcatgtgctgcgcacagcgcacccgctcaacgacatgtggccagaatgcgtggtctcgtttgtggcagcatatgtgcttctgtatgcgccacacaaatcaaattaagcaaggaggattcacattcagaaaaaaattaagcaaggagggcacgcatctccctgcctaggggcatggcgccgtttttgtccttttgttaccctcatctttacctttttcccgctctagatgtgttctcagttgcctgaaaattcaaattgcatcactacattttgcaagagaagaaagaaatccagctcatggtttgtttttttcggttttgattaccttcagattagacagagcaccagctcgaggccgggacgccgcgatttccagcaagggagaaatcacgtccattctttgcggaagaagataaacagtattgactgtgttagaagggagagagaggattggtggaatagttgttgtattgcttgagcctcatgggcatatatataggtgtacatggtcattttggagtacaagtcaaggtagaataatatcctacgctatcctaacttttctaataatcacaatattcaatatcccccgcagtcacaacggtagcgacgcagacattgagactggagaagaatccgaaggcaagctgacggacaccctcccccccacacagttgtaactgtcgatgcatcgcggagtcatggctggagtgaaaaccaacgaggttgctcaagcaggcggtagccctttgtaccgtttgtcgatgtagccgagagcgtgtgtggtggagccgtggtcgaggtagccgtgcgaagaatgccatggtcgatgtcgagtcggggtacccggtgtcgaggaagtcgccgtgaagccgtaggcacaaggaggcgccgagttagtcatgggcgcaggggtgttgaagtagtggtgtgccagaaagtagatgatgttgacaacgcgtcgcgccggggttgccaacaccgagcatgcatagacggacgaagacgaagttgacgaagcgccgcaccaggcttgccaggcccggggacacgtcatggacgaaggcacgtggcggtgttgccagcaccgggcatgcgtagactgggacctacaggagctgtacgccatgttgaggaagtcagagaggctagcagagaagaactcgacgacggttgcggagccaatcggcacggggccaatgttgcccgtggttgttggagtagatgaagcggtcggggtagataacggcgacgctggcgacgggctggtgctggccgaagacgaagggggtggacgagcggctgcggcggctgctacgtcttgagcttgcgttggttttccccgaagaggagaggatgatgcagcacaatagcgtaagtatttccctcagttttgaagaaccaaggtatcaatccagtaggaggccacgcacaagtccctcgtacccgcacaaaacgatagctactcgcaaccaacgcgattaggggttgtcaatcccttcacggtcacttacgagagtgagatctgatagagataatacttttggtatttttggtatagagatgcaaagtgaaaagtaaaagcaaagtaaaaacaaagcaagtataaaagtgatggagattgatatgatgataatagacccgggggccataggtttcactagtggcttctctcaagagcataagtattctacggtgggtgaacaaattactgttgagcaattgacagaattgagcatagttatgaggctatctaggtatgatcatgtatataggcatcacgtctgggacaagtagatcgaaacgattctgcatctactactattactccactcatcgaccgctatccagcatgcatctagagtattaagttaaaaaaagagtaacgccttaagcaagatgacatgatgtagaggaataaattcatgcaatatgataaataccccatcttgttatcctcgatggcaacaatacaatacgtgccttgcaaccctttctgtcactgggtaaggacacaacaagattgaacccaaagccatgcacttctcccattgcaagaactaccaatctagttggccaaaccaaacggataattcgaagagacttgcaaagataactcaatcatacataaaaaaattcagagaagattcaaatattattcatagataagctggatcataaacccacaattcatcggtctcaacaaacacaccgcaaaaagaagattacatcgaatagatctccacaagagagggggagaacattgtattgagatccaaaaagagagaggaagccatctagctactagctatggacccgaaggtctgaagtaaactacttacacttcatcggagaggctaaggtgttgatgtagaagccctccatagtggatgccccctccggcggagctccggaataggccccagatgggatctcgtgcatacaggaagttgtggtagtggaattaggtttttggctcctgttctgatcgtgttggggtacgtaggtatatataggaggaaggagtacgtcggtggagcttcgaggggcccacgaggcagggggcgcgccctagggggggcggggcacccccaccctcgtgaccgcctctctggttccttggcgtagggtccaagtctcctggatcacgttcggtgagaaaatcacgtttccgaaggtttcattccgtttggactccgtttgatattttgtttcttcgaaatactgaaaaagcaaaaaacagcaattctgggatgggcctccggttaataggttagtcccataaataatataaaagtagacaataaagcccattatagtccaaaacaatagataaagtagcatgagcaatcaaaaattatagatacgttggagacgtatcaggcatccccaggcttaattcctgctcgtcctcgagtaggtaaatgataaaaagagaatttttgatgcggagtgatactttggcataatttcaatgtaaatcttcttaatcatggtatgaatattcagatccgaaagattcaagacaaaagttcatattgacataaaaaataataatacttcaagcatactaacaaagcaattatgtcttctcaaaataacatggccaaagaaagttatccctaaaaaatcatatagtctggctatgcttcatcttccccacacaaagtatttaaatcatgcacaaccccgatgacaagccaagcaattgtttcatactttaacattttcaaaactttttcaatcttcacgcaatacatgagcgtgagccatggatatagcactatatgtggaatagaatggtggttgtggagaagacaaaaagagggaagatagtctcacatcaactaggcgtatcaacgggctatggagatgcccatcaatagatatcaatgtgagtgagtagggattcccatgcaacggatgcactagagctataagtatatgaaagctcaacaaaagaaactaagtgggtgtgcatccaactcgcttgctcacgaagacctagggcatttgaggaagcccatcattggaatatacaagccaagttctataatgaaaaattcccactagtatatgaaagtgataaaatgagagactctctatcatgaacatcatggtgctactttgaagcacaagtgtggtaaaaggatagtaacattgtcccttctatctttttctctcatttttttcatttgggccttttctcttttttatggcctcttttttttcgtccggagtctcatcccgacttgtgggggaatcatagtctccatcatcctttcctcacttgggacaatgctctaataatgatgatcatcacacttttatttttcttacaactcaacaattacagctcgatacttagaacaaaatatgactctatatgaatgcctctggcggtgtaccgggatatgcaatgaaacatgagtgacatgtatgaaagaattatgaacggtggctttgccacaaatacgatgtcaactacatgatcatgctagcaatatgacaatgatggagcgtgtcataataaatggaatggtggaaagttgcatggcaatatatctcggaatggctatggaaatgccatgataggtaggtatggtggctgttttgaggaaggtatatggtgggtgtatgatacaggcgaaaggtgcgcggtattagagaggctagcaatagtggaaggatatgaaaagtgcatataatccatggactcaatattagtcataaagaactcatatacttattgcaaaaatctagaagttattaaagcaaagtattacgcacatgctcctatggggatagatttgtaggaaaagaccatcgctcgtccccgaccgccactcataaggaagacaatcaataaataaatcatgctccgagttcatcacataacggttcaccatacgtgcatgctacgagaatcacaaacttcaacacaagtattctttaaattcacaactactcaactagcatgactctaatatcatcatcttcatatctcaaaataattatcaagcatcaaacatatcttagtattcaacgcactcaaaagaaagtttcacatatcttgaataccaagtatattaacgttaagcaaattaccatgctattaacgactctcaaaataatctaagtgaagcatgagagatcaagtttctttaaaacaaatccaccaccgtgctctaaaaaaatctaagtgaagcactagagcaaaaaattatcacgctcaaaagatataagtgaagcactatgagcaaaactatcaagctcaaaagatataagtgaagcacatagagtattctataaaattccaattcatgtatggctctctcaaaaggtgtgtacagcaaggatgattgtggtaaactaacaagcgaagacgcaaataatacaagacgctccaagcaaaacacatatcatgtggtgaataaaaatatagctccaagtaaattaccgatggaagtggacgaaaggggggatgccttccggggcatccccaagctttgactttttggtgtccttggattatcttgggggtgccatgggaatccccaagcttaggctcttgccactccttgtttcataatccatcaaaagaattcacccaaaacttgaaaacttcacaacacaaaactcaatagaaatctcgtgagctccgttagagaaagaaaacaaaagactactttaaggtactgtaatgaactcattctttatttaatttgtttgaaacctactgtattccaacttctctatggatcataaactattttactagccatagattcatcaaaataagcaaacaacacacgcaaaacagaatctgtcaaaaacagaatagtccgtagtaatctgtaactaacgcaaacttctggagctaaaaaattctaccaaaattatacgacctgaaacatttgtttattgatcagaagcaattggaatcaatattttatcacgttctggtaacttttaacaattcgggcactgagcgcaaagtttctggaaattacagcaagatcaaataactatcatccaagaagagccaataggtttaacttggcacaaacactaattaaaagataaaaccacatctaaacagaggctatatggattattattcctaaacagaagcaaaaacaaaaaataaataaaaataaaattgggttgcctcccaacaagcgctatcgtttaacgcccctagctaggcataaaagcaaggatagatctaggtattgccatctttggtaggaaatccataagtggctctcataatagattcatatggtaatttcattttctttctagggaagtgttccatgcctttctttaatgaaaattggaatctaatattcccttccttcatatcaataattgcaccaatcgttctaaggaaaggtctaccaagaataataggacatgaatgattgcaatatatatcaagaacgataaaatctacgggcacataattcttatttgcaacaataagaacatcattaattcttcccataggctttttaatagtggaatccgcaagatgcaagtttagagagcaatcatcaaagtcacggaaatctagcaaatcacacaaagttttgggaatagtggagacactagcacccaaatcacacaaagcattaaactcatgatcttttatttgaatttttatagtaggttcccactcatcatagagtttcctagggatagaaactttcgactcaagtttttcttcataagattgcatcaaggcatcaacaatgtgttcggtaaaggccttattttgactataagcatgaggagaatttagcatggtttgcaacaaggaaatacaatcaattaaagagcaattttcataattaaattccttgagattcaatatagtgggtttatcaatatctagatttttttttctttcaatcccacttttatcagtttcatcatcaagatctaaaaactccgaattcttagaacgccttctaggtaaaggaagatcataatcagtttcatcaagattcatattgcaaaacaaagatttaatagggggcacatcaataacttttagatcttcatcttgattttcataggaattagaagaacacactttaataaaggcatcttttgtagcacgcatcctagcggttctttctttgcactcatcaatggaaattctcatagctttgagagactcattgatatcatgcttaggagtaatagatctaagctttaaagaatcaacctcaagagaaattatatcaacgttcctagccaaatcatcaactttaagcaatttctcttcaagcaaagcattaaaattcttttgtggattcataaactctttaacactactctcaaattcagagggcatcttattaaaatttccataagattttttgtaggaatttccataattatttgaaggattactaggataaggcctaggattaaaattccctctatacgcattgttaccaaaattattcctaccaacaaaattcacatccatagattcatttttattcttaatcaaggtagacaaaggcatatcattaggatcaaaagaaacactcttagtagcaaataatttcataagttcatccatcttttcactcaaaacattgatttcttctatagcatgcacttttttattagtagatctttcagtatgctgttgagaataattaaccataatattatctacaagtttagtagcatctcctaaagtgatttccataaaagtgcctcccgcggccgaatctaaaagatttctagaagcaaaaatcaatccggcataaaatttttgtataatcatccataagttcaaaccatgagtagggcaattacgtatcattaatttcattctctcccaagcttgtgcaacatgttcatgatcaagttgcttaaaattcataatatcgtttctaagagagataatcttagcgggaggaaaatacttagagataaagcatctttgcacttgttccaagaatcaatactatttttaggcaaagttgaaaaccacgccttagcacggtctctaagcgaaaaaggaaatagcttcaatttaacaacatcattatcgacatcttttttcttttgcatatcacataaatcaacgaagctattcagatgagtagcggcatcttcactaggaaggccggcgaattgatctttcataaaaagattcaacaaagcagtattgatttcacaagattcagttttggcaagaggagcaatcggagtgttaaggaaatcattattattggtattggtgaagtcacacaatttagtagcatcttgagccatggcgacaaacaagcaatccaacacacgagcaaacaagcggacgaggaaaaggcaacaggacagagagggggagattgggaaagagagggcgaataaaacggcaagggtgagtgggggagaggaaaacgagaagcaaatggcaaataatgtaatgcgagagatagggattgtgatgggtacttcgtatgttaacttttgcgtagactccccggcaacggcgccagaaatccttcttgctatgtcttgagcttgcgttggttttccccgaagaggagaggatgatgcagcacagtagcgtaagtatttccctcagtttttgagaaccaaggtatcaatccagtaggaagccacgcacaagtccctcgtaccctcacaaaacgatagctaatcgcaaccaacgcgattaggggttgtcaatcccttcacggtcacttacgagagtgaaatctgatagagataatatttttggtatttttggtatagagatgcaaagtgaaaagtaaaagcaaagtaaaaaacaaagcaagtataaaagtgatggagattgatatgatgagaatagacccgggggccataggtttcactagtggcttctctcaagagcataagtattctacggtgggtgaacaaattactgttgagcaattgacagaattgagcatagttatgaggttatctaggtatgatcatgtatataggcaccacgtccgagacaagtagatcgaaacgattctgcatctactactattactccactcatcgaccgctatccagcatgcatctagaatattaaattaaaaacagagtaacgccttaagaaagatgacatgatgtagaggaataaattcatgcaatatgataaataacccatcttgttatcctcgatggcaacaatacaatacgtgccttgcaaccctttctgtcactgggtaaggacaccgcaagattgaacccaaagccatgcacttctcccatcgcaagaactaccaatctagttggccaaaccaaacaggtcgggagtactaaaaatctggctcatgcgcctcgcaagattgaacatgtgcgaaagtcgtctcgaagctctgactctcgaggggataattcgaagagacttgcaaagataactcaatcatacataaaaaaattcagagaagattcaaatattattcataaataagctggatcataaacccacaattcatcgatctcaacaaacacaccgcaaaaagaagattacatcaaatagatctccacgagagagggggagaacattgtattgagatccaaaaagagagaggaagccatctagctactagctatggacccgaaggtctgaagtaaactacttacacttcatcggagaggctatggtgttgacgtagaagccctccgtagtggatgccccctccggcggagcttcggaacaggccccaagatgggatctcgtgcatacaggaagttgcggcggtggaattaggtttttggctcctgttctgatcgtttgggggtacgtaggtatatataggaggaaggagtacgtcggtggagcttcgaggggcccacgaggcagggggtgcgcgccctggggggcaccctcgtgaccgcctctctggttccttggcatagggtccaaatctcctggatcacgttcggtgagaaaatcacgtttccgaaggtttaattccgtttggactccgtttgatattctgtttcttcgaaatactgaaaaaggcaaaaaacagcaactctgggctgggcctccggttaataggttagtccaaaaataatataaaagtagacaataaagcccattatagtccaaaacaatagataaagtaacatggagcgatcaaaaaataggagcccattatacgagggtagcggcggcgatcgaagaagagcggcggcggcggctaggttaggagcgcggcagcgatgctcgaagtaggcgaagaaccctgacagcgtgacgaagaccggctcggacggtggcgttcccgcgctaagggagacggcgcgatgcataccacaggcagtcgacgcgcggggacgacgaagtggaccgcgggccatggaactacggcctgaaggggcgacgcagtggcagtgggcaggtcggggtgacggcaggaagacctcggggcggcggcggggaccgcgggccatagcgctacggcccgaaggggcagtgaatcagcggagcacgggtcggtgcaaccgcggggacgacctcggggcggcggttgggaccgcgtatcgcggcactatgccccgtaggggcgacgcagcggcgacgcgcgagtcgatgcagccgcgagaagaaccacaggcggcggcgccgcggcccgacggggcgacgcagcggtagccggttgctcgatcggaggaggggcgcgctgaactcgagacaatcttcacaggacctgcggaggcgcgcgcaaccgatggtcgaggttggtcgcgcggcgtagatggggcggatcgctgcggcgagtgggtgatcaagccgatcatgcgcgagatcggggacgctgctcggtggaggcggggtggcgacggagtctgagatgaagccggcgacgatggacggcgtgggacgacgtgtggaggagcgcgtcagcaccggcacccgggcagcgaggcccgagtgaccaacggagcagcgacgcccgagctcagggcagccgacgggcctgacgcagctggcccgacgcagctggggacgaggccggcgaggcaccccgcagggccgccgtgcagacgcggtggaggcaggtggcgtggatcgattggcgggccgacgcgcgagcggcggctatgattggccgccgcatggcgcgagaccgccgggtgtaggcaatacaggtgtcccggtcggagcagggcggtgacggccggcgtaggacgacgggcaggccggcgcgcggacgacggccttgaggggacacctgtcgcgcgaggtcgctgggttggttaagtagtcggccggttgtgcggtgtcggagtagaggcgcgtggtgtcgacggcggcggcgggcgacgcaaaccgatcaagcatagatcggaaaacaaaaaaaaaacgcgctaatcaaggtgaccggcaggagagagaaaaacccagagtaagagctcgagaaaaagactctagggcggccggtcaacccgactagcggacgaacactaggtacgggcggcgcggccccggcggcggtcatgtaggccaacagcccagaggacggggcgcgggtgcggaagcggcggcggctagggtttagaactcgaaaactgatacgatgttagaaggaagagagagcattcgtggaatagttgttgtattgcttgagccgcgtgggcatatatatagaagtacatgatgattttggagtacaagttaaggtagagtaatattttacgctatcataccttttctaataatcacaatactcaatagactgaactcgttcgtccagaaatgaaaaggcaaatagactaaggagaaatttggcaatcttgcatgataatggacaaaacgtctaatgcgtgataatccacatgacctctaattcgagaggtatgtaacaacaatgaacccgctgttccatcacgcatacaccttggggatcatgtagccttcacatatgtcctccacgaatgacagttatcaaaagtgaatattaataaaaatgtttgtgtatgtaatttttataatttaaatataacccatacggtatacttttttacatttactaaacaattcataattttatacttaataatgttttaatattatctaaatgtaaataagtaatttaagaaattacatgaatgttttctaaataagttattttatttgtacatacaatatttataacaaacgaatattttaaatttatttttattactttgattatgatttacaattttaaaaaaactaacatgttcaaatgggctgcacggactgcagcccatgtaaaacccttctaacttggcccaacacagggcactaaagggtcgttattgttggttcacaggaaaatcttaatggcgaggtggccggcagtatgttatctgttggaggtggttcacatgccatatgtgcataataatcaaaatgtgatgccatgtcagcatattatacgtctatggataagattatcaccgtatttgccagctcgtgccaagttttagaaccagttcaatgtatttttctagtttagtcactaatgtaaatattgatggcaagtttaagcaccacgaatgatattacctcagaaatactccatcgagctcccatggaagaggttatgtccatcgaggtcccatgggacatatactgtggtcaaagaagtgctagctcaattatgttgcaacttgcaaaatcaaggggctatcctatcttttttgcgagaaactttcaatctattcatctttcatcacggcagtacaacgaatactataaataataaaaattacatccagatctgtagaccacctagcgacgactacaatcactgaaacgagccaaaggcgcgccgccgtcatcatccctccctcgccggagtcgggcacaactggttgtagtagacagtcaggaagtcgtcgtgctaaggccccgtaggaccagcgcaccagaacagcaaccgccgctgataaagaataacgtagatcgaaaggatccaacctgaagacacacgaacatagacgaaccacaaccagatccgagcaaatccaccgaggatagatccgccggagacacacctccacacgcccaccaacgatgctagacgcaccaccggaacgaggactagacggagagacctttattccatcttcagggagccgccaccgtttcgtcttcctgaataggacacaaaccctaacaaattctgaaggaacgactaacaacggaaccctcccgccggcccttaccaggatccaccacgcccccatggccctagggccaccggagacgaggcggacctgcggcggagccggcgagaggcacgaaccctaacttttcttgaaggaggaagccgcggttagaaagaggctctaaggggctatcctatcgaaggaagtaatcaagtagtcgtgcgcattgaacagaaagggctatctcgatcggggaagacgacgacgctgacggacaccggccggccactcggggtgatatttccatatgcggcaatgctcatgtatacgtaagttcaatttgcgtgacgcatgacaagtgcttccgcttgctaatggaaaaaattcaaaataaaccttgaacttatagacgaaagttagattaaaccttgaatttcgaatccctaaaatcagtacccgaactctttaatcccggtctattttaaaccttgagggcattcccaaacaaggaccgctaatgtggcagctcaaatccggatcgagtgcactaaaccatttcaagttggggtctcgcaagatagcttagtcaagagtcaaagctggcttgttgcaataaccccaccaaccctttttgataatgtgcatgtatgtaggatctgatgtaagtcttgctgaatacctttgtactcatgttgcttaatttacgttttacagaagacgctgcaaccccttctgatgggttcttcgtagacgtcgatatcgatgagtaggctgaagcccaggtggtgatcctgagctcatgaagggccatgtagtatagtcaggcttacccaagcctcttttattttactagttgtctgtactcagacaagttacttccgctgttggcttgtatgcttgtatgacttgaatgctgggtcgtgtgccccgtacttgtgtgtatgatatgtatggctctctgagcctttaaataaagtacttgtgttatagagtcatgttgtgatgccttgttgtatttgcacaaatcgagcataatgtgtgtatgattgaaatgcttggtatatgtgggatctgactatctagttgtttatccttagtagcccctcttaccgggaaatgtctcctagtgcttccactgagccatggtagcttgctactgctccggaacacttaggctggctggcatgtgtccttctttgttcctgtgtctgtcctttcggggaaatgtcacgcgatgaataccggagtcctgatagcccgctacagcccggtttaccggagtcctgctagcccagtgatacagcctagattcactcgctgatgaccgacacgttcgatgctgggtcatggatgcctgttcctgtaagtttgtgccactttgggtttacaactagccatgtcagccgggctccttatcatatggatgctagcaacactatcatatacgtgggctaaaaggcgcaaacggtcccgcgcaaaggcaaggcgacacccgtaggaataccgtgcgtgaggccgcaaagtgatatgaggtgttacatgctagatcgatgtggcattgagtcggggtcctgaacccggacactactgggccgactcactaagcataaaacgtgtttttttcttcttaacgcgccatttaaaaatgccaaaaaaagagactgctgggaatcaaaaaagcgtcctgacatggcttacgcatgtcctactggccaatctactactctaacagatgacttttgctaacaaaaatgaagcgccatagtatttaaccacataactcaatgtccagatttgaaatctttctgaaacttttcaacacattttctttaaaattatcaacaatcttgaaatctgatcattttatgatttttttggaattatgaacctttttgaaaatgtgaaccaattttgatatcctgaaagaatttttgaagtgcgaacactttttggaaaaacaaaaaatttaaaaacatgatcaaggttataaaatatgaacaaattttgaaaatttcattctttttaaagatagaaaatgctcgcactttaaattttgttcaagtttaaaaaattgtttgtattcttcaaaaaaaatcacacttttaaaaatggttcatgttttcaaattttctttgtggttttcaaaaaacaatcgtaattccaaaaattgtacactttttaggaaaaaaaaacgtttggagttcaaatattgtttttttataatattttgacttcaaaattcttgacaatttttaagaaaattgtttcaaagaattaaaaaatattttcaagtcttgaatgtaaagtagtttcatgcttcaatttaattactgattgtcggtagttacagtggctggcgccacgagcactgaagcatcaggtcctgagtttgattctgagtcggtctaattttttcagtacttccgcagctttaccagccacgtcggcaattccgtgagaaaacgcttaaggtttaaaatagaccggtcagataatttgatgtgttgatttcaaggattatgagtttagggtttaatttagctttcgtctacaagttcaaggtttattttagactttttgcttgccaaccaacaaaaaacgttaacgttcgtgcgctacatccgacggcagattagcttgtgagtacctagaactcatctagatgagatataatttggtctcattcactttgaaaacaagaatagatacaatccacatcagcgcacacacttcttatagcatcacatccaatggctataaaaggtgaatgaaaccaaattatatctcatctagatgagttctagcaaaactggattagcttggtctatactagtttccgattgattccgtaagatttccgttgtcaccgcagtagactagctagcgcgatcgtcgttgcaacttgcagagtaacttgctagagcacccgcaaacaacttcctatcgcacgcacggacaacaggtgcaaaaccagactagctagctgcgaagtcgatcgattcgtccacatctacacacttcgtatcaaaatataagacgttccttcctaaaaacgaaaggtgtcttgtattttgatacggaggtagtagaacatgttcttttctgttcgaaaagaggtacgtagtagaacattaaagcgagtttgacttgggtacgatcgagcatgcatcaccgatcagtcgcattggacgagaaaccgatcgaagccgaggacgacgtgtcgtgcagcgtggaccatgcacgcatgcacgtacgcacgccactgcaaccatgctcgttggcgatatttccatatatatgtggcatgcgcacgtacacgagtgcaatcgtacgtgtgtgtacgcgaccactgaccaacgtcgccagccaacatcaacacacatagctacaacgtgtcgtcctgatctgccgacgatgatgacgtgggggcgtacactggtacctgtactttttaaccactctacttagcatcgtgactcgaaaacattttagaatatttattttcttgaaaataatcaacgattttgaagtctgaatattcttgacagccaaaatcagattttcaaaatccaaacatggtttgcaaaaatgcgaacaatttttcaaaacattaacaattttcaaatatacacatactttgaacaaatgtgaacaaatttggaaacctgaatgatattttgaaatgccaacacttactaaaagaacttcaaaatgggagaatttgttcttactttaaattttcattcatgttttcaacaatttgttcttcttttccaaaaagtgtttgcacttaaagaaaaattggggctttaaaaaatggttcacgttttcaaaaagaaactgtttgtcaaaaactgttcgtaattccaaaacaattacgtttagaaaaatgttttttgcttttaagaatattctgatttcaagaaaatgttccaaaatgttgcaaaaaaaactttagatatcgacgttgtgtgtgtataaatattttcgtgcttctcttatgttgccaaacgctatcagttaaattggctagcatgagcgttttatgagcgccttgttgcaagttcgattcagggcagcctttctttttcgacgtttttatgccgcgcggttcggaaaaaatgttgcaaaaaaaaaaaaaacacacgctttgcacctgatgggcaggcccagtctggccgcagacagcgatcccgcgttcaacccgccacgtcaacatccctttttggcaatgcgcccaaggtttaaaatagaccgggattaaatagttgggtgtgctgatttcagggatttgaagttgagggttcgatttagctttcgcctacaacttcaaggttcgttgattattttgaaaaaaaaaatattccaaaatgttttcgagtcacgatgctaagcagagtggttaaatagtttcgtgattcactttttatcagcagtagtcatctgtttcagtggctacagcatacaggacaagttttgcagcgtcagatctcaagtttgattcccaccgagacttctctttttttgcttttttagaagtcgaaaaacacgctacaagcttggtgggccggcccagtcaccaacgatcccggctccacctgctgctgcatcgacaatcccattgaaagcacctccaaggtttaaagtagattgggattagagagttcggtgtgctgatttcaaagatttgaagttcaaggtttgatttagctttcatctataaattgaaggtttgttttggactttttccgctagcaaataatctccgatacgtacgtacgcatagcgttgatctttctagtactctacatgcatgttgtggctacagtacacgtagtagtagcgtacaaccatatacacagtgctttcgaaataacgttgatctttctgctcgaccaatcgccgctccgtacgtacgtacgcatcgagttgatttctactctactctagtaactctactctacatgcatgtcgtggctacacagtgcacgtagcagtaacgtacaaccatatacacagtacttctcgaagcaatgtaacgcacgtcggccggtacgtacgtggtcctctgctaacgttaatggtggatgaagaattcagatttcagagcacgtcggcctagctagctctcaaaatccatgtcccggtcgatgaagcatgtcgaccaagagaagactgtagttactacctcctctcatccgtattacttgtcgctcgaatggattatagggagtagttaataacttgattactcggttacttaaccaagtaagtccagagcgcgagcacctgcagacagcctgctcgtgctggtcttctattgtaggtggcaacataatgtatctggacgtacatagtacgaacaggttccacttaaggagtggcactactactaccactggtggtaagagagaccgtgacagttggcccacagtgtgggggagcagcgcgcggcagtttgccggtttgcatgtgctgcgcacagcgcacccgctcaacgacgtgtggccagaatgtgtggtctcgcttgtggcagcatatgtgcctttgtatgcgccacacaaatcaaattaagcaagggagcccgactcagaataaaaacataaccaagggcacgcatgtcgctgcctaggggcacgccgcagttgcctcgcgtgcttgctcgatctactactagttgtttttggccttttattttcctcatctttactttttcccacaccagatgtgttccctgttgcctgaaaattcaaattgcatccatagattttgcatgagaagagagaaaccccgagactgagagtgggagccaggacacgcgcagggtcatagccagagggaaataagaccaactccaccgcgcgaccctatcctgtccgcccccgtccgtttgggataaaagggacaaacgagacggcccagcgcgcggacgcaaatggatttttgtccgctttgtgtccgttttcgacccatccgcggcccaagtttgcgcagcttttggggtgaaacggacaccacgcggacgcgcgggtcgtctgcgcgtgtcctcccctggcccgcccgtcggtgacacaggacgggcctttttctatccgccctcctccctccctccggccgcatccactccactcttcccctctcttcccctcgccgccgccggccgcccgctgccattgcagtcgtgcaactcggacgcgcgcttgcccagccccttcctctcgtcgccgccgagctacccaagcacgaccgccttgtttgcgcacccgccggccggatttggggcggatccggttggtcttgagctcgcccggctgtgggaggccgggccgcgccatggactggcagggcacctcgccggaaggccctggcagggccgcaaggccacatgcaggcagtggctcgtcctctagccgctcggatctgcaccgtcggtggtccgccggcagatacgcaaatggcggccggctgggctcgatgcttgcccaaaagctcgtcggcgcaccgttgcccctcatcaagtgcggccactgcccaagggtggtcgtgcgccacgtgtctacaacgccggagcatcccggatgggtgttcatcaagtgcttaaacgatggggtatgtgctcttttagcttcggtttgtgctcttggattagactagtggtgctaagtttaagttttattgtgtagaacggatgcaagttttggtattgggaagaagagtacatcgatatgttgatagagcaaaatgtagtgcatgttcgtgcacttttagctagcctagaggctttagatgagacaagtgcacttgttgctagattagaggctaggcacgatactacgtgcgaagaagcaataaggcacgatactacgtgtgaggaagcaacgtcgacttctggcttgaagaagaaaggagggtgcaacgtcgtgcctcctccacagatcaacaatgagtgcatcgagaatgccctaacccaactcaagggagcagttatggaagttgggtatcttttcaaatgtattcttgtagttcttgttttctttggccttgctttactagtcaaaatgtgatgatgtattgtcatgtatcaaaaatgaatgatgaaaaaagtttaaggacttgcaaagaaatatacgcggacaggatggggtaaatggatgcggcggcgcgctgggcgcacggccaccgcatcccaggacaggcccggacacgaccccaaatccctacccaaacggacagaatccggacaaaacggacgtccgtttggggcagcgcggtggagttggcctaatggcatttcaacactgacccccaaaacggtccggtctccatctgcagactggtccggatgtagaccgtggacatggtgcgggaaagagctttccaaacctattcacgaaataattctgatttgtccggttgggaggagagagaggagagggggaaggcatgtggttgcttttgtgtgtgtggtgtgcggttcggagagagagagagagagccatgtgggggctttttgttggtcaagtgcatatctgaattctcgcacaactctcccatattggttctcgtttatggaaagatggacatccccactgctccgcaggccaatagggatccttactgaatgaaaaaagttaacaaaagtggttcggacaacacagtccagatatataccggagctttaaggatctttgtgggagatgccctcacgaggtttactggtgcaggttttttttttaccacggattagattagacggattattgagcttcacaacttctttcttcttcgattctaaagaagtagacgttgcttcccctttgatctcttctttagtttcatctctagcttcaattctagctaaaagtgcacggacatctagcaaattctgtgccatcaaaagatcgatgtaatgttattccaataccaaaacttgcatccctcctacacacaaattagagcaaatataaagctaccgagatcttgccgaatcaaaaagcaaaaccaatcctagagaagcacataccccatcttttttgtgcttgacgaacacccattgggatgttccggcgtcgaagagagtcgtcgcacgacctaccgtgggcagtcatcgcactttatgagcggcaacggtgactttgctagcctctagaccagcaacgagccagggcaacggccgaccgtggctttgctagcgaactgacgatgaggtagatacgagcagctagaggaggactcggcgcctgcatgcagcgatggggcattgtcggggctgtgtggtctggtactcggccaatccacggcaaggagcagtcgccggcggccggaatcggcaaatcccgcaggcaggatgggccaaatcccgccaccgtagatctaccgctttgcctcccccacctgccgccgtccggccgacaggaggcaccaaagcctgtggatgtgctgggagggggaggggaggggctggagagcaaggtggccaggaaaaatgggcgacggggtagggtttgtgcacgggagtgggcgtgcgtgggaaggggatagaaaaagggcaaccagcgccgccgacgggtgggccatgggaaggagcaggcgggcgagccgcgtgtccccttcgagtctgcgtagatgcaaatgaggaccaaatttgggtctggaatgggtcgacacgcggacgaaaagcggacacgcgtccgtttgttttgacgtgttgggccaagttttgtatctgcgtcgacccaaatgaacacgcgtggatgaaatgggtcgacgggttgaagttgctctaatgcgtgataatggacataacctctaatgccagaggtgtgaaataacaacgaacaagtgtaccctcagtcatacaccttgggaaccctgtagccttcgcacatatccgcctttgtcggccgtgtagttttcagttcaaactgcagaattacgtacacaccaaaaatatcttgaaatctaaattgatcatagttgtttttaatttgaaaaaagagagaaaaaaaggagtaacattaagacattgcataataaacattgtggcaacatatagcaaattggagtaggaacttggtgactagtagtacaagccaagccaaagctaaaaccgggtactccctctgtccccaaatacgtgacatatatattcagtcaaaaagtcaattattttcaaatttgaccaaatatacagaaaaaatatcaacaactgcaatatttaatataataaatagattatggaaatacatctaatggtggatatattaatattgatttgacattatttatgttcatacttttgtatatatacatggtctgatggtcaaactttgaaaacattgactttttaactgaatttacatgtcatctatttggggaggtagtaaatcgtaaggatggtacacaaactaccagagtagaccacagagttggtgccgcatgggatccatccacagtggagttgcatgcctctgcatgaaaggtgcacgtgagaccacgtagcccctcccatgcccacgagcctgcatactcccgggccggccgtatgcatcaatctatcgatgtgtacgcttatggtatccatacatcttccctgtactactgtacctcccacgtacacgtacgtgtacacgaatggtgatacttgagaaaatgataccgtacgtatttagctccaatcaactaatgaggcaatgatggcataggatcactatctcctgcactggtgcgcattcgcatgagtagttcattagtgtgttacagtatcaatattgttagcaatctagtcatgacattaatttgatttttttaattattccaacatgtgcctatagtattttcttgcacagtgttttctgtagtagttcacagtgtttaagttttgcaatgggcagtgtatatatttgtttcttttaacatagtatagagacagacactcacatatacatgaatacactcatccctataaacacacacacaccctaccactatgagcacctctgagagactgtgtcgacatatcatcttgagattgacggagtcaccaaagacatctcataatcaacgggaatgtctcctcccacttaatgcacatcgccaaaaatcctgaaataaataaaactttaaacgcgagcatcaggacttgaaccctggcgggctggtataccactgtccacctaacaggttggtttgcagtgtatatacttgttgacagtgagtatatgcctttatttgagtttggaaatgattcaggctgatttttgcccaccttattccgtagatccattagaaaattgcttggcccaagaaaagattttctaaaatgggtccgcctaaagtgtaatttagtttgatgaaagatgcaacttgcaatttttatcagcccaccagaaccttttaaaaatgagtatatgatatacttcattaaactgattttggtaaaataaataaacaaatcagctgagactaaaaaaggtaggggcacttgtaagtcgcctaaaagggaatcgtgtgagatttttttggccgttggatctttcacaggatggctgctgtgtttctacttcctccggtctccttcgtcctcttgaccaccgaccaatttgcctgcctctggggtctgcggtcgacaacactcttgtgcacgccctccaatcaccagtgcccaccgtcatggtgccaccaccctagaccatccctctaaaccttcccgaccaccaaatttctccggtgagccagttatgcgccagtcagcccttttccttgcctctgttcacgacgtcgcaactcgctacggctttgcaatgtcgtccctgtctccggcaaggttccatctcggcctcaccgaggtcgacactcggtggcggagctagacggaatcaactggtggttgggtgggcatgaaagacaaaatatgagcttttgtggggtaacagataaaaaagatttcatgtcacccccaccttcgtccatggagccgtattctctctagaatcgacttacgtggattcaatattcaagcgacttacaaatagcttgtgcgtaaaaaacactattttattttaatttcattttttagaatcagcaaaacggttatcaaaaaaatactttttttgtgaatagttatcaaaaagtacttgtagtgttggagacggagacgtggtcctagcagccggtgaaaagcaaatgtctggttattaagagcatctccagttgcgcccccaacaggcccactccaggcattttttctacaccggcgtaaaaaaaatgccccagctgatgaggatacagacctggggtagggtcatgggcctgacccctacatcctacccaaggtcactaccctagaagataagaagtccaagaggcaacaagggacccccagtcaaagatgtcgagtgcaatccactcgaccagtcatgtcactaaggagtccccctacctattgtcactcgaccatccaaggaatcattcgacctaccaaagatcgggagtcactcagcattgcaacgggcaggcgttcactccgtagtctttaaggtcattaataacacttaaggctggcgttatcagtaacgcccctactttatgtacattaagcctcttgtaatggaggacggtgagggtccaggcgtactctatataagccaaccccctcctctggcacaagggttggcaccccctgtaacatcacacgcatataatccaatcgaccgcctccgggcaccgagacgtagggctattacttcctctgagaagggcctgaactcgtaaatcccgtgtgtacaccttcaccatagctgagatcttgcctctccatacctacccttctttctactgtcagtcttagaaccacgacagttggcgcccaccttgggaccggtgtcttagcgacttgttggtgaagttgcaaatttttccgatcatcatcatcatggtttccggcggcggattggctgaaggccgcgagatccgtctcggggcgcttgttttcatcgccgatgactctgcttggcttcaggaagctccccttgacattgaggcgctccccgtccgaggggcgacgcacttccgcgcgtgcattcgcgacgtccttctccgacagctgtggactcagtatcgatcggctccgatggtgtcttccctccctgctgttcgccgccgcaagcgatccggtcggtcgcggcttcagcggtgggtgaaacacgcggtggctcgatgttcggccacccatcaagtcacggcaatcgagcccgacgaaactctccatggcttattcgatctgtcgactgcctccacggagaccgcatccgagtgcgatagcagcgatcctgcggctgaagtcttgatggtcgatggaccgcgtggtccgcctggtttccaccgtgaagacggcgaggatggtggcggcgatccatcgcgcgtcaatgaggaataccatcccgaacccctttcttcacagcagagggaagaacttcgtcgccgcaacatggatgcaatccacacgcccatcattggagaaacccccgaggctcgggccttggaagaggtgcgcttggctaatttggctgagcacactcgactggagaaccttcagtgcgctctcgacgagcgtgctcgggagcggatccccgagtccagtcgacgacatcttttcccgcctccacctaaggtgtaccacactccgatccaaaatctcacagttgcggcccgaatagcagagtcaattcaaccttcccagccggaggccggcagaggtttgatgcagatccgggccttactccgggcagcaggagaacagaacacatcagtgtctcagtcgcggaataggattcacagcagatccgtagtagcggatacagttcagtcggcccacagcccaagatcgcccctgcggtgtgaaggccgtggacagtatgatcatcggcttgaccgcgacaatcatcgtcgagtgcccacacctcctccgaggagtgcatcatatgtgcctcggcagtacgatgatagacgccgtcacagtggcgagcgcagagcaccattcgacccaagagaaccaggcttcgatgcaagatctatcctcgttcaaggtctagtcgaccggaacagagcgcatagagaagaccctggcagagatcatccgagtgtcagcagagtgcatgtttcaggtctagagtgttcgagcagagccatcagggttgcggtgattcctcccaacttcaggttggcgaccggggtcagtaagttcagtggagagtccaagcctgaaacttggcttgagtattaccgagtggctgtgcagattggtggcgggaacgatgaagtagcaatgaaacatcttcctctgatgttggaagggtcggtccgagcgtggttgacccagttagctccaggcagtatatatagttgggaagagcttgctcgagtgttcgtcagtacttttgagggcacttgcaagcggccagcagggttgacagagttgcagcattgtgtgcagaaaccgagtgagactttaggggatttcattcagaggtggaccactttgcatcacaccgttgaaaatgtatcagagcatcaataagtgtgtgccttcaaggaaggcgtcaaataccgagagttggtcctgaagttcggtcggactagagatatgactctgactcggatgatggaaattgccacccggtacgctaacagagaagaagaggatcgactccgcagcggaaagggaaaaccagtcggccaagaggccggtggaggtaattccagtcggaaacagaaacgtaaggccgagcctgcagcacccgctgagattgcaacagtggctcaaggaaagtttaaaggaaaaccgaaagggccctggccccctaggaaggtaaaggatcaagcaggaaatgatgtgttagatttaccgtgtcacatccacacgaagaaggacgaagagggtaatctgatttaccctaagcataccagtcgacaatgtcgactcctgatccagcagtttcgagaaaaacagcctggtgagaaggaaaaagagtcggacaaagacgaggacgaagaggtagacgacggttatcccaaagtcaagtgcaccctgatgatttttgccgatgtggagagcaagagtcggttgaaagttatgaacagagaagtgaatatggtcgctccagcgacgacgaccacatacctgaaatggtctcagacagcatcacattcgaccattctgatcaccctgcgcgtatatccacccccgggaggcaggcattggtggtcgacccagtggtcggaggtactagactgactaaagtaatgatggatggtggtagcggcctgaatattctttatgctgaaaccttgaaggggatgggcattccaatgtgcaaacttagcgagagcaatatgagtttccatggttctatccctggaaataaagccgaggccagatcgctctcgacgtggttttcagtgattcccagcattaccataaggaaaagttgacatttgaagtcgtggattcccagagtgcttatcatgtcattctgggtaggcctgcctacgcacgttttatggctcgaccatgttacatgtacctcaagttgaagatgcctggccccagaggtgtgatcacagttactggcaatcggcagaaagcagatgaatgcttctagaagggttccaaaattgccgatgcgcaaatggcagcagttgaattccaagaatatcagaagaatgcatatccgagtgatttgcttcgagccaagaagcctgccacagattctgcatttaagtcgtctggtgaaacgaagccgattcatattcacccgatcaatcccaatgccgcaccgactcatatatcaacgacactcgacaacaaataggaagaagcgctcatccagttcctccatgagaactgggacatctttgcatggaaaccctctgacatgccgggtgtacccagaggactggctgagcaccgtttgcgtgtcaaccccaaggtaaaacccatcaaagagcatcttcggcggtccgccatacagaggagaaaagcaattggcgaggaagtggctcggctgctagcagcagagttcatccatgagatctaccactccgagtggcttgccaatgtagtcatggtccctaagaaggacgattcactttgtatgtgcattgatttcaagcatatcaatcgggcctgcccgaaagatcacttccctctcccccgtatcgatcaggttgttgactcgacggcgaggtgtgagcgcttgtcttttctagatgcatattccgggtattatcagatccggctgtatggtcccgatgaaataaaaacagccttcatcaccccattcgggtgcttttgttatgtcaccatgccatttggtcttaaaaatgccggagccacattcatgagaatgattcagaagtgcctgctcactcaaatcagtcggaatgtggaagcatacatggatgacattgtggtcaagtctcgcaaaggttccgacctactgactgacctcgcagaaacctttgccaacctaagaaggtatgatatcaagcttaatccgtcaaagtgcacattcggagttccaggtggaaagttactcggttttctcgttttcaaacgagggattgacgccaatccagaaaaggttgataccatcctccgaatgaaatgccccgtgcatgtgcatgacgttcagaagctgactggttgtttggccaccttgagtcgattcatttctcgtctcggtgaaaaggccttacctctttaccgattgatgaagaaatctgataagttcgagtggactgaggaagctgatgcagcgtttgcagagctcaaaaccctgctttccacccagccggtgcttgctgtgccaatcagcaaagagcctctactgctttatattgcagccactggacaagttgtcagtacagtactcatggtcgagcgagaagaagaaggaaatgattacaaggttcagcgcccagtatattatctctctgaagttttgactccatccaagcaacgatatccacattatcagaagcttgtctatagaatctacatgaccatgaagaaggttgcacattatttctctgatcactccattacagtcgtcagcgacgcaccattatctgaaattctgaacaacagagatgcaactggtcgagtagcaaaatgggcgattgaactccttccattggatatcaagtttgagacaaagaaagctatcaagacccaagcaatcgcagatttccttgccgagtggattgagcagcaattgccgactcaagttcagtcggagcattggactatgttcttcgatggctccaagatgctgaatggttcaggtgctggggtagtattggtatctccccgtggagacaagcttagctatgttctacaaattcattttgattcctccaataatgaagctgaatatgaagcacttttatacgggttgcgtatggccatctcactcggcatccgtcgccttatggtctacggctactcggatttggtggttaatcaagtgatgaaagagtgggatgtcaggagcccggccatgactggttattgcaatgcggtaagaaagctggaaaagaagtttgaagggttggagcttcaccatataccccgactgaaaaatcaagctgcagatgagttggcaaagataggttctaagagagaggccattcccagcaatgtgtttttggagcatattcattcaccttcggttcaggaagatcctttcactgaagagtccccacaacctaagagcgccacagatccgactgaagtcgaaatcccagccgtggtcgacttagtcatggaggttttggtcatcactcccgactggacagtgccatacgttgcatacattcttaggaaagaacttccagaggatgaagaagaggctcgacagatcatccgacgatctaaagcctttgccgtgataaaatgacagttgtttagagaaagtgtaactggagtctgccagaagtgcttcacgccagaagaaggccgaatgatcctcaatgatattcactcggggacctgtggtcaccatgcgtcctctcggaccaccgtggccaaagcataccgagtcggattttactggccatgtgccaatgagatggcgaaagaaatagtggacaaatgtgaaggctgtcagttttactccaacatgtcccataagcctgcgtcagctctgaagactattccactcgtctggcctttcgctgtctggggattggacatggttggacctctgaggactggcaggagtggatttacccatgtgctggtggcagtcgacaagtttaccaaatggatcgaagccaagtccattaaaaaccttgaagcaagtacagttgtaagcttcatcagagaattgacattcagatatggtgttccgcacaacatcattacggataatggatcgaacttcgactctgacgaattcagagccttttgtgcttctcaaggcacgagggtcgattacgcttcggtcgcccatcctcagtcgaatgggcaggatgaaagagcaaatggattgattctcaaaggaatgaaaccccggttgatgcgtgacctcaagcatgcagcatgggcctgggtcgatgaacttccatcaatactttggggattgaggacaactcctaatcggtcgactagtcgaagtccattcttcttagtctacgaagccgaagccgtactcccgagtgatctgctccacaatgcgccccgagttgagctcttctcagaagaggaagcagagcaagctcggcaagatgcagtcgatctcctggaagaagaaagagagatggccttgatccggtcaaccatttatcaacaagacctgcgtcgattccatgtcagaaacgtaaggggtcgagcatttcaggagggagacttggttcttcgagtggaccagcagaaaccacacaagctcgctcctgcttgggaaggccctttcgtcgtcaccaaagtgctccacaacggagcatatcgtcttttcaatgtcgagcacaataaagatgagccacacgcttggaatgcggaactgctccgccccttttgctcgtaaagcattcagactgttgagatgtaataagaagtatcttttattttgattatcaaaagacatgattttacagtcttctgaatgattgttgttcattttttatatattctaaaatcccaccagtgggtgccttagccgcgaatccgttttgcctaagttgaagagaaatcctaccgagtggtgagccagcctctcactcagaggcttagctgcagtccagtactcgcctaagtgttagaaaatcctaccgagtggtgagccaacctctcactcggaggcttagctgcagtccagtactcgcctaagtttaaaaaatcctatcgagtggtgagccagcctctcactcggaggcttagctgcagtccagtactcgcctaattttaaaaaatccttccgagtggtgagccactcactctgaaggaattttgcttcagttggactttgaaaaagcttatgaacctctcactcggaggcttagctgcagtccagtactcacctaagtttaaaaggtcctaccaaatggtacgggtcgaccacgacccccccccccccaggggctgcaccgtcaagaagaaggacgagattgtgagagcaatcctctcactcgggggcttagctgcagtccagtactcgcctaagtataaaaaatcctaccgagtggcgagcaacccttccactcgagggcttagctgcagttcaatactcgcctaagtataaaaaatcctaccgagtggcgagcaaccctcctactcgggggcttagctgcagttcaatactcgcctaagtataaaaaaaatcctaccgagtggcgagcaaccctcccactcgagggcttagctgcagttcagtactcgcctaagtataaaaaatcctaccaagtggcgagcaaccctcccactcgggcttagctgcagttcaatactcgcctaagtataaaaaatcctatcgagtggcgagaaaccctcccactcgggggcttagctgcagttcagtactcgcctaagtataaaaaatcctaccgagtggcgagcaaccctcccactcgaggacttagctgcagtccagtactcgcctaagtttgaaaaatcctaccaagtggtgagcaatcctctcaatcgggggcttagccgtagtccagtactcgcctaagtttgagaaacccagcagaatggtgcaggttgaccacgacccctccccccggggctgcaccgtcaagaagaaggacgagattgtgcgcactgccaaaggctcatccaacagccgacgccaaggcgagctgctttcaggaacgtcaagaccattgctgagtgccttgctgatgagctgagcaatgctgccaaaggctcgttcaatagctaatgccaaggcgaattgcgtccaggaacgtcaagaccattgctgagtgcctcgctgatgagctgatcaatgcttctcaaggctcgtccaacaagtcgactgcggcctcttcctcagaagctgcatcgagagtacaaaaaccaatccgagagaagaacaattcaaagataagcctggagcagataaatccaacggtttctaaccgtagattaaagtactcgggcgtcaggcccgaaggagtatcaacgattacaaaatcattcggcattccgaggcaaatgagggcaaagcataatgttttttcaatcactcggcgggagaagggctggccggatcgcagaagctgtcgaggtcgatgctgtcagcaatatcagtggctgcctcaaggaaggtgtccatgaaggactgaaaggagtgcttcttggtattcacaaccttgagggccgccaacttgtcttctctagcctccttgcagtgcacttgaaccaatgacagggcgacgtcagcgccacagcgagcggatgacttcttctattcttgcactcggccaggaatctggttgagtcgagtcatcaacgaatcgaggtcttgagaaagttccgctaggccagagttcggcatccactcgagtcatcgcagccttcagtcgagccagataggcaacaacaccgtccaagcgtgattccaatcgcagcaagttcatcgcaacgtcatctttcacaggacaattgatggggtcgagacctgtctcaacccgcccggtttcagcttcaaagtcctgacaaagttctgttccatcgtgaaaaatagtgagtcgacagtattataacatacttcaatcgatgacaattaactagtcgagtggctataccttcaagcttcagaactagttttgcggcaagttgtcccagatagaactctagcttgtctgtcttggttctaaggcctccaacttcagtggtcaggttctccttgtccttcttcagttgctcgacttctcgattggcttccgagattgcggtcttcaacttcgcgttctcctcttccaacttgccgactgaagccagcttctggtacgcaagcattgtcttctatcgtgcttccttctgagcagcagcaagttcctggtccttcttctccaaagcttccttcattctctttaaagaaacaacactcttcagacgggcctgaagttggcggttttcacgacgcacatctgcttgtgtgaagtcactcggttcaaagagattgaaagaaaaggcagtgaaagacgcgagctactaagtaggcaagggtcgaatagttacctcccatgatggccgtctcttgttgagcaatcttgaggttcttcttcacgagttcaaggtcaagttcaacgctgatatgcttcttctttaattctgaaagttgagctccaagatcacaatacctctgcagtcagcgagagagatatgtcagtcgacagaaataagagacaatgacagcgaaaagttattctaagacctcagccgactgccagcagtcgaccgaggtctcggggactacactcagtgggtgcacttagcatgcccccaccggttcagatcaacactcagcagggtctgcccagagtgagtcaaaaaaagaaagagaagattctaagacctcagtcgactgccagcagtcgaccatggtcgcggggactacacccagtgggtgcactcggcgtgctcccactggtccagacagactactactactcagcacgagtcgagtgaagtggaagatttcctaaattctaaaccaaggcacaccccagtgggtgatcggatataaaacaacattcaaaagctcagtcggagttcgctgacctgaacattggtctgcagggcagtgctggcgttataagccacctgactagcctcatgcatcaccttcacctgctccatgacaaggttcacctggcgaagagcctccctggcagcactcggcgaatcgtctggggtctgatatgcagcgaagagtgatggctccaaggcagttgaagcagcggctggttcagatgtgtggagttgcactggagcggcaggagtcggagtagtcgaccccaacggacgatcagtcgtcagcgggttggcaaatgtgacattggtccgaaccgggtctccggaatgttcgactaccgcctcaagcgccgacgtcgactgagggacttgaacttcaagcctcctcctgcttgacccccactcctcttcctcctctcctgtagaggcacttcttcttcttcatcgtcagggagcacgacgacctcttgcggaactacaggaagagagaaatatcggaaattcagccgactgacgagccactcgaccaaatgaaacctggtcgaacggacttaccagctcgagaagtggctgcatcatcggtctcctcatctcctggtgcctagtcaatgtccatgtcggtgacagcagaggtggggctagaaagatacatgatccagttggtcagaacaaaaacttcagtcgacctatataaacacaagcaagatactcaccccgaagcaacagggacatccatcttaatccgcggcaaagtcttccgagcctttggaggagcaaccttgggctgcttggcgaccttctccgtcggcttgagagtcgacgtcctagtgcgcttttgagtgtgggtactcagagccacgttcttcccgcgcccgcccgccgggtcatggtgctgcttggatcgacgttcagagcgtggcggaaagtcgacttcttcctcgtcgtctgactcctcgctctcctcctcctcctcttcatccgaagactcccattcaccactctcctttgcgctggcctctccctcctggtcccgctccagggcttgttcgccgttgggcatcgaatacatctaagtgaaaacctacaagacaaaaagtcgagtaaaagtcagtcgagatcaagtacagtcggaacatatatgcaagacagtcggaataaagagcataccttgtcaggctgattgtcgtcgctgaaggggatgactcgcctagctcctctagggttgtcctagttgcctgtgatgctccttaaccacatggaaacggtcttgggtggcacctcttctggatggacccgagcggtgtcgtcagatccggagtacatccacataggatggtcacgagcctgaagaggctggatgcatcgactgaggaatacttccagcaggtccaggccagtgacaccctcattgatcagttggaccactttctccaccaatatcttcgtctccacgttctcagcagcagtcactttcagtggagaaggagtctggacacggtcgaatgtgaagtggggaatgccaatcgactgacctggagttgcgacgtcctggcagtagaaccaggtcgactgccagcatctgaatgattcagggagagtcatagcagggaaagtgctcctatgcctcttctgaatacccaaacccccacacatctggatgacatgggtcttcgagtcactcgttttttgctttcttcatcgactgggatcggatggtgaagttatgtttaaaaagaccccagtgcggtcaacaccccaaaaagttttcacacatcggcacgaacgcggccaggtacgtgatggtattgggagaaaaatggtggatttgagcaccgaagaagttcaggaagccccggaagaaggggtgcggagggagcgaaaacccctggtcgatgtgggtggcgagcaatacacactcacccggtcgaggctgtggctccatctccccctccggcagccttgccgcacccttggcgatcagtccggactccaccagctcgtccagatcttctcgccggagcgaagaccggatccaatcgacctggagccagcctggcggtagccccacgcgtgatgacgacccgcgattctgcttcttgcctttcgccgcccccgtcgccttcttcgcacgctccagcgccgtcgtcttgcgcttcaccatggcggtagagcggcagagtcgggagcagaagagctggatgcggtggagaagcaggggaggaagaaagagaaacaggcgtgcacaatgcagacgccgcggccccgtcgccttataaagggttgtttccgagaggctgacgcgtgggaccaggcgatcctgtcaaatcccgcaacagtcgcgcgcaacgtacgtggcaaaaaaggggcacggaaattgaggcaccactgtttatccgctccgcccacttcggcgctccctgcctcgcgcgcttccccgaaatttcgtaacgcatggaatccgggatactctgtaggcaatcgtgccaaggattctacactccaagacaacactcggcagatggtgctataagttcagtcggcaactttctgaatggatcaaggcgactgaattgatgctgaagtaccaaagtgagtttttcatcttgcagaaaacgctcgcaaggtgcaaagctcggaacaagttcaacttcaacctactttccactcgaaccttaatccattcgtgggctactgatgaggatatagacctggggtatggtcatgggtttaacccgtacatcctacccaaggtcactaccctagaagataagaagtccaagaggcaacaagggaaccccagtcaaagatgtcgagtgcaatccactcgaccaatcatgtcactcgggagtccccctacctattgtcactcgaccatccaaggaatcattcgacctaccgatgatcgggagtcactccatagtctttaaggtcattaatagcacttaagactggcgttatcagtaatgcccctactttatgtacattaagccccttgtaatggaggacggtgaggatccaggcgtactctttataagccaccaccctcctctggcacaagggttggcaccccctgtaacatcacacgcatataatccaatcgaccgcctccgggcaccgagacgtagggctattacttcctccgagaagggcctgaactcgtaaatcccgtgtgtacaccttcaccatagctgagatcttgcctctccatacctacccctctttctactgtcagtcttagaaccacgacaccagccgcgcccccaagacaccgaattccgccggctcggtcctttttgcacccggcgatcgcaggccgaacccggcgcactggggggtgctcgggggctccggcgcaaggggaaaagcgcaccaggggccacactgccaggtgaaaagtcaagccacccgtccagattcgcctccgacccccctcccccctgtgctcggccgccaccctgccggtcccggtgccgtccaccgcccaccacagctagaccattccctgccggaaaaaagaagaggtttcgccgaggcagcctctccaccgtcgtccgagaaacttttccggcgttccggccgcacagggcctgtacaccggcgggtttacgcccacctcacccgcaaggtgttcggtgattttcccggcacggcgatggactcggaagatgaggaggcgctcacggcgttgctggaggaggaagccgaagccgacgtccaggagcaagagcacctcatggtgctcgccgccctcgccggcctgctcacaagcagtgaaaagccgcgcgaggtggctcggtacctgggtgggtgaaagaaaagaaccggcatcgtctggaaggctactgcatgctctactctgactacttcgccgacgctccattgcacggcgagaaaacatttcggcgccgttatcgaatgagccgaaagcttttcctcaggattgtgaattccatccgggagttcgacaactacttcaagtgctagatggattgcactggcacacttggattcacctcaattcagaagtacatgacagctatgaggatgcttgcatacggagctcccgcttattcactcgacgactatgggcgcatggtcgagtccaccaccattgagtgtttctacaagttctgtagggcagtggagtgtttggaccgcaatacttggaaacacccaatgcggaagacactgctcggatcctagcagagaatgcagcaagaggatttcctgggatgcttggaagcatcgactgcatgcattggaaatggaagaactgtctatttgcttggcaggggttgtacaaaggcgccaaaggcgattgcagtgtggtacttgaggcagtggccacacaggacctctggatttgtcactctttctttgggatgccaggaactcacaatgacatcaacgtcctgcagtgctcccctgtctttgccaagcttgttgaaggtcattctcctccagtgaactttgaggtcaatgggcggcactacaacaaggagtactacctagctcatggcatctatccaagatggtcaacatttgtgaagactatctcaaaccctgtgccaggaggcaagaatgccttctttgtgaaggttcaggaggcttgcaggaaggaggtcgagctggcatttggtgtgctccaacctcgatttgctgttgtccggtaccctgctcagacctggtcgaaagatcaaatatgggagatcatgacttgatgtgtcatcttgcacaacatgataattgagagcgagcaggaagagcaaatgtttgatacagaaccatattacatgcagggacctcttgcccaagttgatcaccagctaccggcaacctggactgactacctcgacatgcgtcaggagatccaagacccacaggtgcatcaagaactgcaacaagatctggtggagcgcctatggaggctcaagggcgatgccgggaatgacgtgtgatgaaatatgagtttttatttgttgaactatataatttgtattgaactatttgatttgtattgattttctgtgatgaactatggaggcaaaaacatgcccaaacacgccgaaccatgccgaactatgtgataaactaattgatttatatttgttgaattatttgtgtgagaatttacaccgaaacacgccgaaccgcgccgaatatgggccgattcacgcagttatcaagccatttttggacgaaatagggccaaataatgggctgaaatctgcgcctgggggcgacggctgggtgcccaacaaccccagagccgagtttgccactggctcgtccccaggcggcgatttttatggctcctggggggccaacggctggagatgctctaaatgggccagttcttatccacaacgctcctatattcacggatcaacctgtcgccgaacccctgaaccggacccggaggcaaaatttgcttgcagtcccggtctagcttggctccacaagcgagagtacagatgcataatcaataggactgtgctaacgaccagtcgactggtcgttagcgacagatccgcacgaccgtaacccagcttcctctcgcgacccgcacgctcgattccaccgatttttcttcttctctcgaaaaccgtatacgccaatagtaaatcgccggcggtttttctggttttttggctacatacataatatgaaaagaaaataaaagtgctggaaagggacttgaacccaggtctattcattagagtttgagcccaataaccaactcaaccacccctagttgttatctatcgaatataaacaaggttattttaacctttcttttttctgtcatatcagcgataataattgtttttgcttggtaactttggcatgatcagtgtgataactatgacttgagcaacatgataactatactataataagcctgataactataatatgaaaaggttaatgactatacgatgagaagcacgataactttagcatgtggtagtggtaacttcacactggggtatgtttcgacaacaaaatgttaccgggacatgtttctgtaacgtttttcacatgggtaaagagttatcaaatgtgttgcatgtaagttatcagttgtctggtgcataaattaccatgctatttgcactaggttatcagggcatatttctagaactttttgcccaaggatcatgcaccacagatctgataactcacgcaccgctgtaaagaacatgataatttatacgcacgaacctgataactcacgcacaaacaccgtgataacacacgcacaataaatattttcgcccaagtaaaaagttactaacactcgaacagatctgtagtagaagagtctgcctcaacatgaaggtatgaaaaatatctaacatgaatcaaatcacaacatagagtttgtttaggtggttgctggtagatttctaatactgctggatctgttagatcccaggttcgactccccttgccctcctattttttttaccgaaattaaaaataagaggtgcgggaattctggatcgggagcgggcgggagcgggagcgatcgtaaataccgatcgaaggaaaaaaaacagacgagagcgatcgtacgtgcctatcgctaaccaccagtcgactggtggttagatttctcataatcaatatcatcatcatgctgtttttccctctctgtgttttcacgatgagaacgcatcatgcaactagctctaggcaaacatatacgtagtacattaccagtctatatctatatctataattctatatacctactaataaaaaaaataggtattcttaatctgttttgctattttatagaaaaccccctaatgtttctgacactaaatccgtagtacatatcaaatgttttttaaaatacccatatcttctaaaccgtaatttcaaaatttaacatgctatatatgaaatatcattagaaaaatatgtagaatctgaatatgatgttattgtacctgttaacaaataaaaaatactatctaggctacattgttaatcaacaatacatatccgtctttttcatatcggtactgattcagattggggataaacacctcagcaaaatcgggattggacatgaaattgaagataaatttgctagagacacccaataaataaggacatgcatgacaagaaataaaaaaagacccaataaagatgagatgactgctacaaaagaaataaaaaagaaaatgcagatgagatatgataaagatgagatgttgcgctattctcctatatataagaagaaaaaagagaggacatgcatgaaaaaagtaaaaaggagggatgcatgacaaaaaagaaaataaagacaaatttgataagatataaatagtgatgaaacagggactaatacctatgacatgtatggcaaaaaataatgatgaaataggggcgcaagtacatgcatccacagtagaccatacaaaaatgttctttttcagacaaaaaaaatctcttttatgatgaaaaaatcatgtatctttttaacaatctttttaacaactcttcacgtatttaagaaatatgcatgtgaaaaaagtgttcaagagttaccctaagttggtgattcttaaactgaaaattttcattgatgcacacatgtctccgtagtgtgctaatgtcatcgtttgtttttgtccattttcttcactcgcccgtaacaacaccctatttcaaacatgacatgaatagatgcatgatcacttgcccatttatttctacagattaaatctacatgcaaaccgtgttgaaatagaacacctgtagaatcttaaattgcggttttatagattaagaccatttttttgggccatagctacaaattctcagattatagacaattttttgtaaattaaaagtgtgcgctatttttttctctcgttgcaacatatgggcctttttgctactactaactaattattttctcgtcaacatgcatggatgctgctgcgcgacacgttatgtttttggcactgatctgctgaatatacgatattttttgtcggttcacgctgattggatggtcacgcacgtgcaggatggacggtctgtctaatgtgcaccatacatgcatactatatccacgtaatacatacttcctctgttcctaaataattgtctttctaaccatctcaaatggactataacatacggatgtatgtagacatgttttagagcgtagattcactcattttgctccgtatgtagtcatttgttaaaatctctagaaacacaattatttaggaacggagggagtacaagacaagttgcactgtggagagagagagagagagagagatgagaagatgctttaaatggcagcttggttagtggtgtggtgcaacaagaggtgcaaagggttggcacgtaccaagtggcaaatctagtccacacgtccactgtccgctcacctgtccaaagtgtgaccacagacatgcaccccagctgcacgatcgaactgttcccatctcagctcacaagtggagcagcatctatctatcttgatggaattcctatccgtccagaataagtagcacagtacatttccatatgatgaaactcaaggaggctacatctacaacttttgatcaacttgattttagatccatcaaatgaatatctgtcgggaaaaagatcatatacttgcttcgtaacgagtttacgaatgatttgttaccggaagtcatacgtgcgcaccgggctcgaattttgcttttcactagtacatggtatattctttatggcgaacggctttctatcgtgaccattgctctcaactattatattggttttatcgacatatgggtgtggtcgctatcacttacgtgtgcgttatattgtttacaatggtactatatttttttcaaacatgaccaacatctagctcaactttatcctggttttaccgatggatgagtcatgagtgtgatagtttatggtgggtgtggggaacatatatatagatatagttctacgcaacggccataacaaagacacacttgaaaagcggttaaagtcactcagccaaaaagggcaaaagggagggaaataagagtctaaactcgccaattatctaactcgcttaccaataaccgttgtgtgataggctgatagtcaacgggccttgtggagatattttagcctgcaggtgcaatcaacccaggagtacccaaaaacctttcggttttgccttataaacacagtagcaaataacatcagcaaaatactactccacttagtagtacaaaacacagaaaaagagcgtcgacatcatgagaaagatactgcagcacaaagtaaagcaccggtattaacgagacgcgaatcgatcatggacgcaaccgcccgagcgatgaccaactgatcgaccggattaggtctggcttttacctttgcagagctagccacgacatggccacagctccaaccacagatccgtcgtctccctcatgtggcaccccatcggaccacctatctcgcaaatggaaagtatgtgtccctcttctgttcactctctaggctaggctagtgtttcccggtggcaattaaggccgttaagcctggccccaaccccccaaaatgaacaagagacaccaaacctaaaccaagaaaacaccaaagctctctcgtcaccagttcatcatcaccacatgcacagagtgcacgagctggcgaccgtgcggcgctactactagtagctcggctcgcggcccgatcgatccatgtccatgaggagcgttccatgaccaacccctcctccccgtcttctccttcctcctctcccacctccgcgcaccatcgccggtaccaagaaccggcggcggcggcggccaacgtgggcaacggcggccgggtcgaccacggcatttcgtttccggcggccgtagacgacgtcgcgggcgccgagctgtcgcccccgcgctgcgaatgggagttccggctcgcggccaccgtgccgtccccgtcgctggccggcgcgtccgaagccatcggcagcgtcgacttcgaccccgccggccgcctcctcgccacgggcggcatcgcgcgcaaggtccggatatacggcgtcgccgccctgccgtcctcgcctagccccgccgcgtgcatctgcgtgccggccaagctcagcagcgtgcggtggcgccccgaggaggggggcgggcgcgcggtgggctgcggcgactacgacggcgtcgtgacggagtacgacgtggagcgcggcgtcgcggcgtgggagcgcgacgagcacgccgggaggcgggtgtgggcgctggactacgcgccccccggcggtcacacgtccatggcggcgtccggctccgacgaccggacggcgcacgtctgggacccgcgcgcgccctcggggtcgtgggccacggcgcgggcgggcggcgccgtgctgtgcgtggagttcgacccgtccggcgggccgcagctggcggtgggctcggccgaccggcgcgcggccgtgtacgacgtgcgcgcgctgcgccacggcgcggtggcttccatggacggccacgcgcgcgccgtgacgtacgtgcggtgggcgccggcgcggcgggtggtgacgtcggcggccgacgggacgcaccggctgtgggagtggccgtcgacgccggagctgtcggggccggcgcgggaggtgcggtcgtacagcggccacgtcagcgggcggagcttcgtggggatggggctgtggcgcggcgccgggctggtggccagcggatccgagtccaaccacgtcttcgtctacgacctcaggtggggcaagcctgtctgggtccaccccttcgacgtcgcctccgacagctcctccgacgccgaagggttcgttagcgccgtgacctggctgcagggtgaagccgacggcggcggggcgctcgtcgccggcaggtcggacggcgtgctgaagatgttcacgtgccaaccacgccggggagatgaccaccaggtggacgacctatagcgagtcacactctccactgcccattctgagccagtgtgcatgtgactagtgtgagagagattcattcttgcgtttcaattatgattatactcctacttgtttttcttttgttgcgcacaaaaaacaaacttgctagagcacaggggatatgattctttccccttttctttctatttcttttattttgtgactcgttcctgacaatttttatgtatgtactatgtactgatctattttccaaggaatacaaataactaaatttccatcgattacacaatgaagtgttctttttagatgatcccacgttggggcgaatctcatattaaccgcggaaagtaattttggatatcgtgcacaaaagcagattttgtgcaaccagttgcccgatccatattccatattttgttttattgttttctcaaaaaatgagaaataattctcttcaaaaaaaattatatatattacggcgatataacgtgtgcacttgcgaaatgctcatccaacaaacattaccattttgtcatagaaaaatagaaaaaagattcaaacgatagtgctcaagtttaataacatacagatagtataaattgagtttcttaggtcataataaggctcatggcatgttatgaatttttggagatgctcattatatatcataacttatttcaatgtactattcctcatttttttggaactcggaaaatgaaagaaaaagcagagagagagagagagagagagagagagagagagagagagagagagagagagagagagagagagagagagaatagcgaaaaattatacacactttttttcttcaaaaaagtaggttgaaacctcttggcatatgcatcctcagatgcggcaataaattttttaaataaatgtgaagcaatgatacagaaaaagatctactgaaaaatagagtacatacagtggacaacttggaagaaccacatcaaagattaagaacaaaatacacctaaagtcgagattcctcctctgaagtatgccctcacaccgatatcaccgactccagctgatgaagtttaggacataaatttcgaccctcgatgaggggtccaaccaattaagagcaaaacatcgctaaagctatatagatatactcatatgcatgcatgtacatggatgtatgtagcgttcaccatgtaagcgcgtgatcatttaataaacatgtgtgtataagttgtgtatttcaaatgatttgtagattgctcaccacgcctaggaagaatttcaagtatatgcacgattcaatccaccaccccccccccccccccccccccccccccccccccccccccccccccccccccc

SEQ ID NO: 9 - DNA, 16716 bp, Artificial Sequence
  Scaffold 1895355
cccccccccccccctcctccacagtttacgcccccggtcataattttgaagtgcttaggcgaagccctgcggagatcacttcaccgtcaccatcaccacgctgtcgtctgatggaactcatctactacctcgacatcttgctggatcaagaaggcgagggacgtcaccaagctgaacgtgtgcagaactcggaggtgtcgtacattcggtactcgatcggtggatcgcgaagaaagttcgactacatcaaccgctttgtgaaacgcttcctattacggtctacgagggtacgtagacacactctccctcttgttgttatacatctcctagaaagatcttgcgtgagcgtaggaatttttttgaaattgcatgttacattccccaacaatggcatcatgagcaacagtagaacacagagaattgtgggcgctgatcggcatactgcttaccaccaatcacccacaaggtattcctccggtatccaagagttgcataatctcatagtcgaaggaatatgtatttgacatgaagaaaggaatagtaataaaactgaacggtcattatgctaaactaactgatgggtgtcgtccatcacatcattcttcaaataacaactcatgtccatggttaggaaactttaaccatctttgatcaacgagctagtctagtagagcttactagggacacagtatctgtttatgtattcacacatatatttatgtttccgatcaatacaattctagcatgaataataaacttttatcatgaataaggaaatataaaataacaactttattattgcctctacggcatatttccttcacatcttggaggcgtgtcgattgacttgtcgctctatggtgagccttgtttctttgtgcatattcttcatgtatgtggcacgtgcaatcacatccctgttcgtgcgctcttatagaggaagcaggacgatgtccaatggggacaaagggttgaagccgtacaccatgtcaaatggagacttgttcgtagtcgcgcgtcttgcgcggttgtaggtgaactcggcgataggaaagtactcctcctactccttgatgttcttcttgatgagcatgcaaagaagtgcagatagcgtttggttcaccacctcggtttggacattggtttgaggatgatagagtttaatttggacatcgatgtaggtttcaacgtgatggttttgtgtgtgtgtgtgtgagagagagagagagagagaggaggggggccagatgaggtttttttcatgatgggaggggggggtcgaggggagggggagttggaccctattatagtagagattatgtttttattttgttttgagacacttgctggcaaagcctttttaaacaatcatgcgaagttttattgacccatcataatatttacatggacaaacgaaatatcaccggggtggtctaaccaaacatgacaaccaacccgagttgtaatgcacgcttcgctagattatgagcctcaaaattcaaactcctaactcatgaacaaaaattacataaattaaaagtgtatttttttagcaccatagacagatcagcccagctcggcctcacgtcgggaacaatttggctgcaagcgcacattgggcctctagagttccaccaagaaaggaaaaacaccctccaaaaaaaacaagaaaggaaaagggaatcggaggtctgttataccccgtcgctgccgtttgccgatctcccccatctcgccgtcgccgtcgccgtcgaaggcctcgtctgagggtcgtgtggtgcttgcgaagaggcgaccaaataaacagactccctttgggagctgtagtctccaatcgaagcagcagctcctttccgagctacaaccggtaatcgaagcagtcaagcggcagtccgcaatccgcaatcgaagcctttccccttttcagtcgcaatccgcaatcaaatcagtccttttttcgatatacagccagaaaaccggtctctggaatcgagtctccgacctgcccgccacgccgatggccaaatcatacttgaagggcctcggcgaatcctccctcgacattgtggtgagttcgtcctcctgttcctttttaacttcattgtatataggtatatatataagatcctcaaaaatcaaggatcaataaaagctaggaatcataatctgaattcatgctcaaaaggcgcgtttggttgcaagaagcgtgtatgtgcactgcatataatcaatcgggtagctagctagcctgctgcatactgacgaatcgatctactccatgataaatcttcgcttgaggcatgcactatttgctggaaagtaattgggcaccaacgagtcgataaaagcattagcaaattatcataaaaaccaaagtatcaaaaactacagtaatttagtcagtaggtacacaataaaacactctgctgctggtgggtgtgcttgactgctgctgggctccagccgtagccgctgcccaccgcgaccaacacagcggtagatttagggactttaagtctaggacctttgttgtacaaattcgattagctttagggttcctttgtaaagaaacaatgacacttgtcggcctctgggttgattcagaaagttctgtaccacttttcactagtttccaagatcatgtatgatgggtgtaattaactcaaaaaccataatattggaatatggcgctttcaaaaaacaaaaaattgcttccaaacagggcactttttttttgtggggaggagtcaaaattgcgccaatctcttggaaagtactccctctggaacttaatgtaagacgtgttcgatacattgagttacaaatattgtataaaatttgtataatcaaatttgtgttttttattcctgtggtaagtataaacctgtataataaaaattgcatcgttttgtgggtaagtataaaagttctgcaatcaaaagtgcgtctttttgtgagaaagtttgaaaattgtatctttgtttgtggaaaatactaataataaatcaactctgattcgtttccttatcaaaagtaggaggacaatgaagttgataggctcagcaagttgcctgatgacgttttgctcaacattgtggagcgacttgatatcgctgatgccacacaaaccaccatcctatccatacgttggaagcagatccctgctatactcccaaaggttgttataatggttgcttcttttcagcccaagcacgaagggaggaagttaacctcagatgatatagttcgggccaataccaccgtgttgaaagcaaccaggagcatacttgaaagaagggctggaaatccatacagcattcacctgttgtgcttgcaattctacttgggagatgagtccattttcattggccagactgttgccaacaccatagcaacacaaaaggttgcctcagttgagtttataatcttgacgagggtgcgcaatgtttttaccaataatgagctgctcacttatgggagacagttcatgtcattccttgattcgtgtccaatcacatttggtggtcttgcacgtctcacgctacagaatttgaggttatgcgaatcaggctttccgaaaattttcagtatatgcaagcaattggagttcctccgcctctaccactgtgatatgggcattgagtctttgctggaagtggagcacccacagctcagtgaactagtgattgcctgtagtaggattattaagaggattgatctaaagtgggtaccaaaactcgtagtagtgaaatttataatgtatttaaatctctaggtgaccctttctgtcttggctatgtcccgctgctccagactgtcagcatcattaatactgttttttcttggcacaagatgctcaagctaagtgagttgcttgggaaaaccgcaattagaaatctgcatttgaacttcaaaagcgaaaaggttagtgaaggtcctcaatgttgtcagtgatgtgcgttagttttgctgtccatgtggggtggaggttgtaatcattattttcagttaacataattctatattatcgccctcttttgcagatttgggtcaaaccggaaggtcgaagacgattgttaccggcgttccacaaactaaggcttgtgaatttgaataacatttttgaaggatgcgatctgacttggataatgttcatactccaaggagcacccagccttaaggaactatgcatcgtggtgaactcttgtaccgattattcaattctcatttttattttctcagtttgaagttcaaacttggtgtggccaattaagaattttttatctgacaaaatacaggtgcgggatcatctatgtgaaatggtaacgggggagcagagaaaattgtatgcatttagcgaggagaaggacaagggactagagctggaaccatccgcatctgatttcaagcaccgcaaccttgctgagctcagaatctttgggaggtttctagcaaatgacaaaatcatgcgctttgtcaggaatgtaatggaagcagcggtgaatctggaggacataaaactttataagagtagtgtgtgagaattgcaagcacatggttgagaagtggacattgaaggagaagttgtggctcagccacgagctcaacgaggggatactgtcttcggccgtccggattcagttcccggatttagtgcatgtttctactgggtcaacgtactgctcttgagcagcaagctcactaagtacaacgcagttgacactagattcagaggttgttgtttatagctgaacgttgtacacacttacataaagagaaaaaacaattaccgcctcggaattttgggcttgactctttttacacacaataattgacaggatataccaaaaatccagaatggatagtataattataaatgcatgacaaaattaaatagtcacctgtgtgacatggggattccatcagtcatctttgagtggcttattagcaagagaccggggcctcccatcccacccttcccggcgcctcccctccccttctcctcctcccgccgccactagcaccactcgagcaaggcccggcgccagggctcgggtggctggcggctggcgccggcgcacttcggcggcagcggatccggcggcgacgtggctccttgggtggcgcggtgccgggtggcgaggtggcggtggcgtggctgcttggcggcggggcgacgcggtggctggcggcggtgccctcccggccaagatcttggcccttttgggccccatctgggtttgggcgggcctggccagagcttctctgcggcgtctccggcggatggcgggccaactcgtgcaaggggcggcggtgatggcggctcgtgtactgcagcgcggcgattggagcttcacgagcccgtttcgggctcggccgggcctatctaggccttcgatgcgggggcgaaacatggtttcggggggttgctgtagccagcgcaggcgccggtcgtggctatgggccacttctccacctccccattcccccggttgatttatggtcgcgtgtgcctagtttgcccctgttgctatgtccggccggttcctgccacgggcggtggaggttgtcccctcccgcgtggttgctgttcctgccgctcctcgttcccggttgccttctctgttcccaccggtctcgcttcgtttgccacggtgagtcggcgatggggactgcacggccgtgctggcgcatgttggtgggcggcgtgtttggtggcgcgcgatggatcgtctggagtcgtgggtggttggtggtcaggagaaatccttgtcggcttatccggcaccgacgcggtgacgcctgtaggcggcgccgtgccttcctgaagggcgtcgggtttgccccttcccccgcactcctcagcgtaccgggggaaaccctaggacttgtccgggaagcaatgttgtcggtgtcgtgatgcttcttgaaggtgttgcttggtatgcggcggtccggattgcttggagtttggtggaattcccggtgggcgcagcgtttgtgggtcttcatcgtttttgttgatccgtcgatgttcgcatttttgttttgttttctctttcgtttcttttgggttccgccacagcacctatcgttggttgtattgatgatggttgctttgtaatacaaagcggggaaaaccctttttcgtattagcaagagaaaaaaatcatatggtacaacaaagatatactccctcctatccaaaatgagtgtcgtggttttacttcatcttctacgtgacaggttgggcccgtcctgacatttttttcatctttgaacggtgttttttgttctaataggaaaaatgtactgagcttggcactagtgtctttgttttcctttttcaattcatgcaagtccttttttatttatctgaacgtaacttgatctgcttatttcttggctctgtttttttgctttgcagtttttttcgattcatgcaagtccttcaatatttttgtttgtggatcgggccaaataattatttcatgtttttatgccagaaggaccgatttatccacgacacctggaaccgcatctactcggctgagtcagaacctctcggcatgtacatacagggctcggacgaggcagacagtcatcaaaagaattcagagcgacatgaggcgtgcaactttatgcattacaatcattatttctgccagttatcatccatagtgcttgtcgtcaatgtatgctcccacccctccacccaccacccctataagcataggctgaggattcggcgtgctctatataaacccctctctatctctaggacagggttctcaatcttctgtaatcctcagatgcaagaagcaaaacggatccagagctcaagacgtagggtctttacatcatgttgtatgagatgtcctggccattgtccgggacaacaactctggtgatgatctcatcatcgtttgtcgaaagcaagcaccgacgttacgtcgtaaaagtccacttcatgtccctccttgccgtcgatgtacattatgatgtacataaaagaacactttgccgcccgccatgtgtagactatgctaacaaagcatctcctcgttgcatgagaacaccatcctcggttcttgctggcagccggtactgtccaatgatataaccatcaaacttgtcttatcgtcggcatactcctagacgagagccttgtagaccctgctagagggtgcgtacccaaaccctacctcctctttcgtggccgggttgaaaacaacacagtccacggacgaccgcgcggccaggaggactagcccattggacatgttgacgtaccagctgccgtgctcgacgttgatggtgtgcttaaattgatccctctgatcctgttctggatccaatctggagacaaggatgttcataatttcccttcataacttgtttaggaataactgattcatggggtggaaagaagaaaacaatctatttgatactatggatgattggttatgaagggaccgtttcgtttttgtaggatgtggcaaaaaaaagtttgatttagagggaggagaagtagcggaaattagagggcaaaattgagcggtttgtgaagtcatttgcccttaaaaaaagaaggcgcaaggcttctccctaccatgcagaaaataaaaatcaaacgaatgggacatcgaaagaggatggtttaactgtagcaagagcaagaaacattgagcatttcttatcacaaccgttctttgtggcagaagtttttactggtccttgataatatatagaagaaggggtcatcttttttcctttttagggataggaaaattttgtcgatatggttcattttatatatagcataacaatcttgggcaagagtttatgatcatatgcgaacgtcggtccgacaacgtggaagtagaaggtcctgcagctatcgtgccagtagaggcaagcggcgtgagggagttccaggcctagcgcgtcgagatgtgggcggcggagccagaagtggggcttgtgaggagctgctggaaccgcttcgagagcaccgtgcagcacagatgcagcgggctagcatacgggcgaggatctcgtcgggcacgaactcatctccgaagacaacctccttatctgcctcggacgccatgactagctggaagagtttgcatgattaatgatgtgactaacatacaccttcggccggccggccaccatgtattgtatatctctacctacttactaacaaaaggggctattatttctggtggtacgtcatcgtaattgctcccaaagttgtcataaattaccccactgtgccattcataagtaaagaaaaaatgaatcgtttttatttccaaatcgcacccaggttccatggttcttatatagactgctgcacttacaaacgtgagcacctgagcaacgcagtggcttcgatctccaccctcctcacgggagaccaggttttgatccctatcctttttctccctctccctttttcctctcgaaagcgcgcctgctcctcccgcacgtggtaatggactggaccatttgtaggtcgtagagccttgatttctttttctttttatttttttacattcacatttctgtttaagttttctcttccttaaattaattcgtgatttccaaaaaaaccaagtttcaaaaatactgaattttttaaaaaatatattgagaaagcccaaactgtttgtgaattcaaaaaaatcagaaaatcagaaaatgatcatggtttctaaaaattgttcacatattataaaaaaacacaatttcaaaataaatgttcatgatatacaaaacatattcagggatttaaaaacaatgtacatgaaattttagaatatgttcagaaaaattaaaacagatccgtatataacgaacataactataccccttttctctccatattttctctcgcaagcgtgcctacttctcccgcgcgcggtaacgggccggcccatttgcaggttgccacgaccctgttttctatttcattttttgctttttacgttctcatttctgttttagttttttctttttaaattaattcatgatttccagaagaaccaaaattcaaaaggttgtgagttctttgaaaaaagtattgataaatcataaactgtttgtgaatcgaaaaacattcggaaaatcataaaatgatgatgattttaaaaaattgttcacatattataaaaccacgatttcaaataaatgttcatgaaataaaaaagttcatgatttaaaaaaaatatcctgtatttaaaacatatccaggaaattaaaaaatgtacatgaaattttagaatatgttcacaaacttaaaacagatctgtaaataatgaacataacgataccccttttctctccttttttttctctctttttttgtgcaaagatagctaacctttattgaatattgaaaatgtttacaggtataacagccgtatcgaaccggtacccaaccaaatatgtctcccaactgggagattaacaccatatagagctatcttatgtgcctcaaaatttaaagctctagactcgaaaataaaatcacaagaactaaaaagtattgaagtttccttcagctctttgacaatgccgtcgtagtttcccgcgtaccttgccgaatatgattgaccacttgcttgcaatctgatgataccagaacatgttgcatgcccaagtattgagctagggctagggcctctacaagctacggcttccactgttacacggtccaacagttcgtgtatcacaagtcctgcacgctgtaatggaccagcccatttgcaggttgcaacgaccctgttttctattttattttttgctttttacgttctcatttctgttttatttttttcttctttaaattaattcatgatttccaaaagaaccaaatttcaaaaggttgtgagtttttaaaaaaattattgagaaatcataaattgtttgtgaattcaaaaaacaatcggaaaataataaaatgatcatgatttcaaaaaattgttaaacatattataaaaaatatcacaatttaaaataaatattcatgaaataaagaacgttcatgattttttttaaaagttccagtattcaaaacatatttaggaatttcagaaaaatatccatgaaattttagaatatgttcacaaaaattaaaacagatccgtaaataatgaacatagcgaaccatcacttacgttcatgttttattaggggatctgaaggtgtcgttttataattttatttagtctctagctttgggtaaaaaaaagtttttcgtgtcctgtaaaacgccgagccccaaaaaattgacaaaacttcttatgggttagtttttgtaagctatataaaattactaaatttctattttgccttcatacacagctacatttattctagcaccacatctaccattcttacgaagttgctccccacttctccctattctctagacatgaacactgtccatatcagcggattgccacgtcatttttcagttttcaaaatcacccaatcatctccttttattaccctacggtcacggtggtggaaaaaagacctgcttttccaatgatatgaatcccattaattaaataatggacggcatggcttattcttcttctttcatgtaactgtgcaggtttatactgaactcgccagaactcccattgtctaagtctgcgtaatcccatcaacaagttgataggtttggtaaactccaagtatgtgtattgattattcagaggtttgtttcagtacaatttcgtttggttcgattcatattactagcagtttgtttgtaaatttgttgtgttttatcaaccaatatgtgaatcatgcttctcaccactctcagtcatgaatctgtattactaaccatgcatgagatttaccaatcagatgtctcttataacatggtagttaagcccacttccttcttagcaaataggacatttgcacacagcgtttctatgtaaaaaattgtaacatggttccgctgcaacacgtaccatgttcctgatctctctattctcgcacttcctctactctgttgcttcttgactatatcatgcagttggcctgttgaatatgtttgtcttgccttccttgagcatgttcagagatgggtggatgtttctgtcatgagacacacctgctgtgtgttagcattttttccccatacttaatatatctgcacattattagctagatcgattgtataagccggtttgttacaacagtgttaagtttgattggcacgcctaacagaacgaagcgaccattattccattagttgattacaggtttctaataaatatttttattgaggccctctgtttgtaagactgaacaaaatggatatcccagaaagttattcatagggtcgtgctattcgaccagtccccttgaccagccccagtgcagctgctaagaactactgcaggcatatgcaacttaatagggttagttaggttcttgaagccacctaaaatttgtagttccgcagtaagcatgatatctattgatttatctacagctcatttgagcatcaagttcttggtatcaatcagacctatacctcttaacatgatgttcactaactcaacagtcaaaggaataattcagataatctttgtaagcaccaaacttgacatttatccgtaatcgtaagcttttgtcgttcccatctatcagggactacctttgaaatcaataacattgtgggatttattttggcatgaagggcatgttgacagagtcatagagacagacacacttgtgatagaatttgtgttgtcgaggaggaaagatccttctactggcatttagatttgaggagatgttcttgtgaaaagttgacaaccaattttcatttttactactattttcttagttacatgtataaaactgagtaatagcttcgattttttgtcgaaagagaccttctgcccactgtaattgacaaaagagaccccttgcggacgaaattgacaaaagggaccccctcactagtggcggcatgcgcggcaggcgacacgtgtcacctgccgccacactgtgaggcggcgggcccggccgccacaacacgaggcggcagcccggtgaataacggtggcagcacaggccagcgtgccgcgacggaacgggccgcgccaggcgggcccggccgccaccgggtgaggcggccgccgctgcccctgtcgctactcggccgacaaggcctgctgcgcgcgggcccagcaggtgggccacgccgccactagctgaggcggcacatcctgtgctgctgcacgcacgacagtgcgcagacggctctgatttcgaggtgcggcgctgatttcgaggcgcgagcttgatggctgtgactccgacgcgcgggaatatggacgcttttggttctttcgcctgggaatcaatcctgcctttgcttcttttgcctgagtggatgcgatggcactgggaagctgttgtgccgacactacagggatcgtaaatatccccgcttaattttctcgccatcatttatcgtctgagcttataaaaggagacaccgaggctctcgtccacccatcctcgaaatcggcagtgcgcagaacccggaagcggcggcatgaagatatcatcttcgtcctcgctctcctcagtccataaaaatggatgcttttctgcagtccttttaaaagtttcactcttcggctccactaccttcttccaccttgcattcaacctaagaagttctttgcgtacctcctcatatgtcctttcaggccacccagacctacgtaattggtgagccaactcattcattatggtgtcactaccggtgagttcgtcccatggaactatcctattgtccatcctgaaatcggtagctagcctcagaagagtgctgctcatcccagggtgaaaactacgatcgaaaggataatgggacatctcgactacactacactcgaatgcttatccacctccatctgaagggggttttataggtagagaggagaaaatggcgggaaagaatgactgcggtatggcgggaaaggggtggcgagaacatatggcgggaaggggttggcgggaaacgggtggcaggaagatatggcgggaaggggttggcgggaaaccggcctaacataagcaaaagagtggagcggatagtattgcgggagatataggcgggaaaaattgttcctggctggtgcattttatttcagcatacatagatgttcaaatcgaaaagtctaatacagacatatgtagatacaatgggtcgcgcatgtggatagatgaatcaccctacttacgacgaccacctggcctttccttacgaccggaaggcgacaagcgattaggtggccgagttacacgaagaccgcggccgtactccaattcggcttcatgtgtctgcgagtcctgcgtaggtggtggagtcgcgaatccttgttgcgaacctgaagcgtaattgtaggcgtatggttgtgaatccggggggataaaagatgggccaataacgtccccttcgaagaactctgtaactaatgatgtaaccgtgtcgccaagaatatgtgatgctccccggaggcctgtgttgacgccatgatcatgtgatgctccccggaggcctgtgttgacgccacgttgggtgttctcatcgtcccaaataacatcaggtatgtcctgcacatataaacattttaaacaaactgttagaggataatatatgatatcattgtaaatgcattgaaatgtaaacatgactacctgagcatatccctctcctatactgtctggccattgtacgtggtgctggtttaaatctggtacacgagtctcctcgggcaaggggatccctcgcgtgaagagatacggctgagatccctcaccttgggtgtatgcatcatatcatgtgtacgcatatgagttaggggaaagaaactgctcgggcatcgaatccaagcccgtgccatggtcctgagatgtctgcccctgacgaagctgcatcgaagaagagcgatgcagcggcagagatgagtcatgtcgtggcaatgtcgttctagtactcggaccctccccccattgctcatggctcgtacgcgcctcactcggtctggacgacggtgccgcactcggtctggctgacctcgctaccggcatgtatgctccagtggcaacgtcgtcgcctctaccgcatctgaacttctttgccacgaattgttgcaaaagtttctggaatgtcttacggtatgggccctgggccggcatgctatccgtagccatctgccctacttcgttgacattttcaagctgaacaatatttggatgttatttagttcaaatgattatgaaatgatggacctaaaaaagttacaagtgattaccaggtggtcacgatagtaagctgcatgcagctcaacatgtctccgcgcctgctcctcttgtgtgagatgtgttggtatagtgttggtatagtagctggctgactggccaggctagcacgtgtgttcatgcagtaccactgcttgtacgcttgatctgtacttccatcgtacggtctgcgaaattaaataattacagaaaccgttgtgatgaaagcaaagcatcttcacgcatcgtatgatcatcataaaaaaataatgtacataaaatatacctaagttgacgcactatatctgctagcgcttcattttcccacttgtgtacccattcactgttctcttccctccaatcgtataaactccaacccctgcccatatttgttagcctgcaaattatgtaacaaagtgtgagtttagtaaattaaaaataacactaactatttagggatgtcacatcttacttatgtgtttcctcgtcgatacgtctgggaaaaggtggtggaatttcttgatagagaccgaactgtctcattacacgctctgggttgtaaggttcaacacaccacaggaacaataagttgcagcgagtcagccagaatgcactatcggtcaacatgcctggtgtgaagtgtcgagcatcaaagaccatttttagctggtcctgagtccacgggttccatgtgacttctgcctcatcaagtatctcaaactgctggtggtacatagggtaacaatttttcgctatatctggagaccaacgtttccgtgcctttgtccacctggtggccatagttgcgctagcaccctcgccaaagtcgtatgggtatatgggttgtattatacgaggtcgtcctacagggaggtatacccaggaccacaactgtagaaactcataggcgacacaaagtaatggagctttttgtgcgaaagaggttttttgcgtggcatcacacaagcctctgtatgtatgagatagcatggcagaaccgaagctgtattttggctgctcgggtaaaggttcatctaccatattctctgcaatgtagatgagaccagggacaacaacgtccccatgtgaatttggaaatagattcccgaggagccacaacaaatacgcaaacaaatgtctttttctcatctcctcattggcgaagctagataaattaagaaagttatcacgaagccagacgagtgggatgccccgagggttactagaacattgtgattctggcatttccatctcaagacgggctgctatatctaatgcccaagatggagacactcgtggagagactaccggctcacctctaattggtagagcagtgatcatagaaacatctttcagtgtaggtgcaagctccccaaaacgaaagtgaaaggtgtgggtttcaggtctccaccggtcaacgagggatgtcaaaagggatgggtccgaacgtacttggtcgtcgcatgatgtgagcctagcaaaaccttgtagtccataagcgtcaaggtgagcaaggaaatgattgtgtattggccatgttttctttatggttcgaagtctgaaaagccgataatcatgcttagtatttggtttcaaaaataggtggcaacggtggccggcgtcatggggcccctgcaaaagcactggcacttcacccataacctgcacacaaacatacaaatataaattacgaggaagacagaaatacaaatgcaaatcaaaattaacttaaaaaatacaaagagatacgatttacattaattatctgaagttaacatcaggagtacaataatacaaagagaatcaatttaaatttaatataagtacacataacgagtataaatataaatagacatggcgagtacatatatatcaacatcgtgcgttgttgttggctcgatacgggcagtctttgcgtgaatgtccaggacacctgcaaacgcggcatcgccttggttctcccatctggctatggtccatgtcattgcgatgacgcctagactgacgtcgtccctttgcggttctcatcaagtcggtgttcggaacccatttcggcccatctggccacaacattttgtagttcatatcaatgccccaagcccagaactcaccgttccaagtattgtacagattgtacatgttgaagtacggcgatatgtatggctcgacgctgatttttgaacagcagccgcccggagcacatgactgcaagggtagccctcaagcttgggctttttacaagtgcactcacaggaggttgagccaagggtgatagcttgcttttttgatcctctgtggtgacccttaacgtacttggctcgcacattgacctcccacttattcctaagtgcgtccactttc

SEQ ID NO: 10 - DNA, 45874 bp, Artificial Sequence
  Scaffold 1931208
aaaagcatttgaaatgaactctaaaaaggttgaaagttggcatggtatcatcatttcacccacatagcatgtgcaagaaagtagagagggttacggcgaaaactggatgaacttcgtgtacaaaacggacaatctcttacgaagtatcagggtttcatacagaaactcgtctgttacaaagggatttcatttttttaaacttatttgaactccatagtttttctatgttcaaaatgcaccattcgaagacacatcgccaattctcaaacctttctgacttcatttgttatttttcatgcatttactgattattttgagctataagaccatgaaactgaaaagcatttgaaatgaactctaaaaaggttgaaagttggcatggtatcatcatttcacccacatagcatgtgcaagaaagtagagagggttacggcgaaaactggatgaacttcgtgtacaaaacggacaatctcttacgaagtatcagggtttcatacagaaactcgtctgttacaaagggatttcatttttttaaacttatttgaactccatagtttttctatgttcaaaatgtaccattcgaagacacatcgccaattctcaaacctttctgacttcatttgttatttttcatgcatttactgattattttgagctataagaccatgaaattgaaaagcatttgaaatgaactgtaaaaaggttgaaagttggcatggtatcatcatttcacccacatagcatgtgcaagaaagtagagagggttacggcaaaaactggatgcacttcgtgtacaaaacggacaatctcttacgaagtatcagggtttcatacagaaactcgtctgttacaaagggatttcattttttttgaacttatttgaactccatagtttttctatgttcaaaatgcaccatttgaagacacatcgccaattctgaaccctttctgacttcatttgttatttttcatgcatttactgattagtttgagctataagaccatgaaattgaaaagcatttgaaatgaactctgaaaaggttgaaagttggcatggtatcatcatttcacccacatagcatgtgcaagaaagtaaggagggttacggaaaaaactggatgaacttcgtgtacaaaacggacaatctctttcgaagtatcggggtttcatatggaaactcgtctgttaaaaagggatttcattttttgaacttatttgaacttcatagtttttctgtgttcaaaatgcaccattcaaagccacatcaccaattttcaaccctttctgacttcatttgttatttttcatgcatttactgattattttgagctatacgaccatgaaattgaaaagcattggaaatgaactctgaaaaggttgaaagttggcatggtatcatcatttcacccacatagcatgtgcaagaaagtagagagggttacggcaaaaactggatgcacttcgtgtacaaaacggacaatccctttcgaagtatcagggtttcatacggaaactcgtctgttacaaagggatttctcttttttgaacttatttgaactccatagtttttctgttttcaaaatgcaccattcaaagtaacatcaccaacttatttgtgccatgcgcctatttgtttgtatgctcaatcccttagtgcaagagaatgtcacgttgtattgccccttaagatgacaacctttattatgcagtctgtcgcttttattgtttgccatccaagttcgtacaacgctcaattttctcttacactaaatgatctcatacttttggaagcaatttttattgcctttttgcaccgatgacaacttacttgagggatcttgctcaatccctaggtaggtatggtggacacttgaaaaagatttacgtttaagggtttttggatatacaagtagtatctctacttagtgcggaatttttggctagcaaagataggggccagcatcacaggttaaaggatctatgacaatatgacttctatgtgaatataaacaaacataaaccattaagttgtcttccttgtccaacgtcaacaattttggcatataatattttgatgagggctcacaatataaaggatttctaggatagtatatttatatgtgaatcttctcttcccttgttaattctttcatgagttgcatcattgactaatgctatgtttgtcaatctctaataaaacttcctacttatacttttccttatgtggtgctgtcacctaccataggattagtatatgatcttattgatttatttatttatttatttcctttcttttatttatttcctttcttttatttatttcctttctctttttcctttcttatttcttttctttatttgcaacatgaaagtaaagaaagcaaaaactcaaactgaactttattatataacttgcacatgaatacaatgatagatgagtaaacaaactctcaaataagaaaggatcgaactaactttatttcatctaaagcaaaagatcgaactaaaaataataaaagcaaaatatagtgggatgatacgataccggggcacctcccccaagcttgacgcaagccaagggggagtgcccatacccgatactcagttctcctttggtggtgaagaagatggtggtggtgatgaagaagtattcctatccttaaggatcaagagattatccaaccgacggatgacgctccggagataggtgatatgctcttgatgcagaatattttcgcgaataagatacttattttgtgtgcgaactatttcaatgacgcgaaaagcttcaatctcagcaggagtaaggtgagtaagatagggcttaaggatatcctcctccccctcctcctcagccagcactgcttgtgttgccatcgaggatggatccacggtagcttccttgcccttgtctcccttgatggcgtccgtaggctcctccctctttgtctcgatcttcatttgccaagcatcttcttccatgtggttggaagagtagggagacatgatgcctggcttgataaatctgaccggaaacagcaagaaaagagaacagaggattttctccgtgatacggtgtttaaccggttcgggaagtatatatagattttttttatcttggaggacaagcatacaggagaaaaacggagtacgggaggtgtcccaggtgggcacaacccacttgggcgcgccaggcaagcctggtgcctggcacaccctggtgtattgtgcccacgaggggaagcttcctggaagtttctttatttttgtagtccgcttacttaccgtatcatgtacctccttattttcatgattctcgagtgttccggaaggattcttttatgtgttcttccggtgtcaaagtttggataatattactttcaacattagtgggcgtacctgagatataatgctttattcgttgcccattgacaaccttcgggttagtaccttcagaattattaattttcatggctccagaccggtaaacctcatcgataacataggggcctttccattttgagaggagttttcctgcaaagaatctaaattgagagttgtataaagaacatattctccgactttaaactcacgcttttgaattcttttgtcatgccatcttttgactttttccttgaataattttgcattttcataagcttgggttctccattcatctaatgagcttatatcaaataacctactttcaccggcaagtttgaaatcataattgagttctttaactgccaaaaatgctttatgttctaactcaagaggcaaatgacaagcttttccataaaccattttataaggagacatacctatagaatttttatatgttgttctataagcccaaagtgcatcatctaattttttagaccaattcttcctggacctattgacagacttttgcagattacctttatttctctattgctaagctcaacttgaccactagactgaggatgataggatgatgcaattctatggttaacatcatacttagcaagcattttacggtaagcaccatgaataaagtgtgaaccaccatcagtcattaaatatctaggaactccaaaccttgggaaaataacttccttcaacattttaatagaggtgttgtgatcagcactacttgttggaatagcatctacccatttagtaacataatcaacaccaacaaaaatatgtgtatacccattagaggaaggaaaaagtcccatgtaatcaaatcctcaaacatcaaatggttcaacaacaagtgaataattcataggcatttcttgacgcttaccaatattacctattctttgacattcatcacaagatgagacaaacttacgggcatccttgaagagagtaggccaataaaatccagactgcaataccttgtgagcagttctatctccagcatgatgccctcataaggttcggagtgacatttgcataggatttgtccctgttcatgctcaggtacacaacgtctaataatagcatctactccttctttataaagatgtgggtaatcccaaaagtgatgtcttaaatcatagaattattttttcttttgttggtatgtaaagctagatggcaaatatttagcaacaatataattagcatagtcagcataccaaggagtactatgagaaacatttattgcagctaactaatcatcaggaaaactatcatcaatagttggtgggtcatcaagcacattttcaagcctagacaagttatcagctacggggttctcagctccttttctatcaatgatttgtgaatcaaattcttgcaacaagagaacccaacgaataagtctaggtttagcatctttcttttccataagatatttaatagcagcatggtatgtgtgaacagttactttggaatcaacaatataaggtctaaatttatcacaaacaaacaccactgctaaaaattctttttcagtagtggcataatttctttaagcactatctagagttttactagcataatgaataacattcaatttcttatcaactctttgtcctagaacagcacaaacaacataatcactagcgtcacacataatttcaaaaggcaagttccaatcaggtggttgaacaataggtgcagaaattaaggctttcgtgagtgtctcaaaggcttctaaacaatcatcatcaaacacaaaaggaatatccttttgcaagggactagtgagaggcctagaaattttagaaaaatctttgataaatctcctatagaaaccagcatgacctaggaaactacgaataccttttatatctttaggacatggcattttgtcaattgcatcaaccttagcttggtccacttcaatacctctttcagaaattttttgacccaagacaatgccttcattaaccataaagtggcacttctcccaattcaagacaagatttttttgttcagatctctgcaaaaatcgatcaagattgcttaaacaaccatcaaaagacttcccataaacagaaaagtcatccatgaaaacctcaacaatcttttcacaaaaattagagaatataacagtcatacatctttgaaaggtagtaggtgcattacataaaccaaaaggcatacgtctataagcataggttccaaaaggacaagtaaaagtggtcttttcttgatcaggttgagaaacaggtatttttgaaaaatcagaatatccatcaaggaagcaaaagtgtgtgtgctttgataatctttcaagcatttgatcaataaaagtcaaagggtaatgatcttttctagtttctttgtttaattttctaaaatcaattatcattctatagctagcatgtaacaattctttgtgaaataaggaacaacagcaatacctcctttcttaggaacacaatgaacaggacttacccatctactatcaactataggataaattatacctgcttccggaagttttagtatttccgttcttaccacccctttcatattcggatttaaccgacgttggtggtcaacaactggtttagcattaggttccacattaattttgtgctgacatagagtggactaatgccctttaaatcatcaagagtatatcaaataacagctcggtgcttccttagaactttcaataatctttcttcttcatgttctgaaaggttagcactgataataacaggatatatcttcatttcatcaagataagcatatttcaaactgtctggcaattgttttaattcaaaaacaggatcacctttaggtggaggaggacctcccagagtttcaataggcaaattgtgtttaagtagaggacgttgttcaaagaaaatcttatctatatcatttctttcatgcatatgtaaatcattttcatggtctattaaatattgttctaaaggatcagtaggtggcacaacaatagaagcaataccaattaattcatccttactaggcaattctttttcatgaagatttctactaaacttggaaaaattaaactcatgagactcatcaccgaaactaacaccaacaatttgtttcttacaatctatcttaacattaacggtgttcaagaaaggtctaccaaagataatgggacacaagtcatcttgtggggaaccaacaacaagaaaatcagtagggtattttgtattcccacacaagacttcaaaatctctaacaatcctaaaaggtgatatggtgtctcaattagcaagtttaatagtaacatctatgtcttctaactctgcaggtgctatgtctttcataatttcttgatataaagtgtaaggaatagcactcacagtagcacccatatcacataaaccatgataacaatgatctcctattttaactgagatgacaggtatgctcacaacaggtctatgtttatcccttttattaggtttagcaattctagcagcttcttcacagaaataaataacaggctcatccatatcttcatccaagagatctttaaccataggtatactaggttctactttattttgttcatcaggtttaggtgttctaatctagcttttgttaatcacagttgaagctttagcatgttcctttatcctatcagggaaaggtggtttctatatataagcagaaggaacaactggatgaacattataaattatagtttcttctttaactcgtaccggttctttagtttcttctttaatatgtgggtgatatctaaaccacttctctttagggagttcaacatgagtagcaaatgattcacaaaaggaggctagtatctcagagtcaagtccatatttagtgctaaacttttgaaaggcatcggtatttataaaatatttaacacagtcatacttgagcttaatacctgaatctttaccttcgtcgagttcccaatcttcagatttgcgtttaattctttccaaaagatcccaccggaattccatagtctttttcatacaagagccaacacaagaagtatcaagcatggtttgataattacgagaaagccaagcataaaaaagttttgaataataatttgtcttgagagatcatgattggggcatgaatataacattgactaaagcctcccccaggctagagagatactatttccttcaagaggacaaaaattatatatataattccgatcacgatgaactagatgcataggataatttttttggtggaactccaatttcaaacgattccaattccatgatccaatatcattgcatagcttatactatgtcaatgattttatcttcaacgataaaggaaaaaaaaattcataacttcatctccgggtaaacctgcaagcttaaacaatccacaaatttgttctacctatatctagtgcatatcaggatgttcggttccttctcctgcataaggattagctagcagttgttctatcatacctgacggagtttcatattcaatattttcagtaggtgcagtaggttgaggggtaactagttgtggttccgtacaaggtgaatataccctgaacaaacccctcaaaggattgttttccatagtaacaagtgacaataaatttcagcacactatataaatgtttccttaccaaattccacttaccaaaggcgcttcactctctggcaacggcgccagaaaatagctttgatgacccacaagtataggggatcaattgtagctattttcgataagtaagagtgtcgaacccaacaaggagcagaaggacatgacaagtagttttcaacgaggtaatgtctgcaagtgctgaaattgtgagtagcggagtagtttgatagaaaaataatttgtaacgagcaagtaatgattgtagtaataaatatgcagcaaggtagcccaatccttttgaggcaaaggacaggccaaaacgttctcttatgataagcaaagcgttcttgagggtacacgggtatttcatcatgtttatttaatttgtgttcgctactttgataacttgatatgtgggtggaccggtgcttaggtgctattcttacatgaacaaacctcctacttatgattaaccctcccacaagaatccgcaactacgagaaaagtagaataaattctaaccatagcattaaactttaggatccaattggtcccttacggaatagcgcataaacaggggtttaagtttctgtcatcctcgcaacccatcatctatttgctaatccacaatgcattaccttaggcgcaaatatggtgaaatgtcatgtagtcgacgttcacatgacaccactaagggaatcacaacatacatactatcaaaatatcgaacacatatcaaattcacatgattacttgcaacatgatttctcccgtgacctcaagaacaaaattaactactcacaaatgataaacatgctcatgatcagaggagtattaaataacataatggatctaaacatataatcttccaccaaataaaccatatagtaatcaattataagatgcaatcaacactactaatcacccacaagcaccaatctatagttccggtaacaagattgaaaacaagagatgaactagggtttgagatgagatggtacagttgaagatgttgatggagattgccgtccccaagatgggagagttgtttgtgatgatgatgacgatgatttcccccttcgggagggaagttccccaggcagaatcactccgccggagggcaaaagtgctcctgccaagtttctccttgagacggcggtgctccgtccagaaagccctctacttatttgttttttctaggtcaaaatgacctatataccagaagatgggcaccggaggtgggccgaggagggcacaacccaccagagcgcgcccaggtggcttgtgcccacctggtgggccccctctggttgttatttgctccaatagttcttaaatattccataaaaattccttgtaaagcttcagcttgtttggagttgtgcacaataggtggcctgacgtagctttttcaggtccagatttccagctgccggaattctccctcttggtgtgtaccttacaaattatgagagaaaaggcattagaattactccaaaaagcattattatggacaaaaacatcataaataatagtaagaaaacatgatgcaaaatggacgtatgagtacatgaggaaatcttcaccaaaagactttggagtcctttgtctcttgctcctaataggagcttcctcgtcatcctctgataaactttcatcacttttgtgttcataatattccattggactggcaggttcaggagtctcatcagattccagtctagaagtgctttgcatatatctcatggggaaactatcctcaaagaatgtagcatccttagactctataattgtaccgaccttctggtcaggtacctcagatttcactactagaaatctatagccaacgctattcttagtgtagcccaaattaacgcagtccacggtctttggtccaagcttacgctttttggggatcggcacatcgactttcgccaaacagcaccaagtacgcaagtaagagagtgtatttcctttcttttcccattgcacgtagggagtagtctcatcatccttcgcgagaactttattcaggacatgacatgatgtcaatacagcctccccccaccatgccttggataaacccaatatatctaacatggcgttagccaaatctgttagagtacgtttttccgttcggcaaccccgttcgtggggtgaatagggaggcgtcctctcatgaataataccatgttccgcacagaataaatcaaacccactagaaaagtactctccaccatgatcagaccggactcgtcttattttcttctcaagttggttctcaacttcaaccttatagattttaaagtagtgtagagtctcatcctatgtatttaacaaatacacataacataatctagtggaatcatcaatcaaagtcatgaagtatttctttccacctttagtcaaaacaccattcatctcacagagatctgaatgtatgagctttagtggtgccaggtgtctctccttcgcaggcttgtgaggcttaagaggttccttggcttgcacacatgcatggcacttagagcctttggctaaagtgaaactcggtatttctttgattttaaagtagtgtagagtctcatcctatgtatttaacaaatacacataacagaatctagtggaatcatcaataaaagtcatgaagtatttctttccacctttagtcaaaacaccattcatctcacagagatctgaatgtatgagctttagtggtgccaggtgtctctccttcacaggcttgtgaggcttaagaggttgctttgcttgcacacatgcatggcacttagagcctttggctaaagtgaaactcggtattagattcatcttagctaaccgcgtcatacaaccgaaatttatgtgacaaagacatgaatgccaaacctcacattcgttcaaattagaatgaatttggttcacgattttattacagcctccagggaaaggtggaacaaaccaccacaatcatatccgtttccaacaaatagtccataccgagatacgactattttgttagactcaaatactaacttaaacccttctttacatagaagggagccactactgagattcttcttgatggcggggatatgttgcacgttcttcagttgcatgatctttcctgaagtaaacttcagatctaccgtgccaacaccatgaacagaaggatgcgagccattccccatcatgacggaacaatcttgtgcgacatggtaagaagaaaacaaagacacatcagcacacacatgaatattggccccagtgtcaaccctccaatcggtggactgacaaactgaaagtatggtaaacagattaccatacctagatgccgcatcattgttgctcagagtgacattgacaaacttggagtcatgtcctagcttcttgtacttgtttgggcacttgtttgcacagtgttcctctgaaccacatgtaaagcagccatctctctttttgtctttcttcttacccttcttcttaaaggtagtattctgctggacagagttcttacccttgaacttgtggaaattcttttgcaccacattggcgctagaagaaccatctatccctttcacgtgtgagtcatttgctctccagttctgctcaacacttagatgaccaatgacatcctcaacagagaattcatgtcttaagtgcttgagagaagtagcaaagttcctccatccaggagggagtttcacaataatgcaacccgcgacaaacttgtccggtaattcacaattcaggagctctagctccttagcgatgcattgtatctcatgggcctggtccaatacagaatgattatcaaccattttgtaatcatggaactgctccatagcatacaactcgcttccagcacctgttgcgccgaacatagcttcgtgtgcattccacaaatttttggcaacgcgcatatggagatatgcgtccacaagcttgtctccgatcacagtaagaagacggctcccacagagatggtggttgcctccctaaacgcattctcctgttcaggagcaatcgttaccgtgggagaaacaccaccaaccaagaacacgttcattgctgtgagccataaggtggtcctcgttagccaatgcttaaaatgtattccggtaaacttttccggttttagagtagcggtgaagcaatgagtcgaaaagtgcctaaaataaggtttttcggttgttggaaatattagcacattttcgaccaatctaatccacgagtaaacagtaagcatggcaaatacggtatgcatctcataccgatacataagcatgtggtcacgtacagtacataaaaccgaaacatctatgaacatcatatatacagccaacacatgaacgagaaaatagaggatgtatgagtcatactccccggttggccaggccaatgcggcggcggcggcggcagcctcggcatcggcgggcggcggaagaggaggagcacgcgtgtacaactcctatttccaagctaccgatagcaagtgatgaagcagcccttataaaaaggtctcactctttttactggagcaatatgatactaaacttcccacattttccaccacttgccatacacatgcatggaccttaaagattaatcaaggattattgtcttatatggtcctaagcccatccataattcatcaggagctgcagtgcaaagcatcatgctgtgaccggtggacttcaccggtggggggagctgcagtgcagtggacctcaccgacgatgggagctgcagtgcagcatacagcggcgacggtggctgctatatatgacccgcgggagttgagctttgctccgacggctgctggaaggcgacgttgctgctgagaaacgtgagagacagaaacgctgggaggggcctgatccgacgtccaaatggctgtcaaccccaaaatcagtcggttggtttgtagcagcagccctaaaataaaaatccagtctttcgagagaaaaaaaaatctagcgctgtaccagcggtaccaactccgagttggaccaagagtcctggcgccaagaaacaccgaggtgtactcggattatagtttgctagcacaccgatggaggtattctccttttatatttcggcagcgcaaagacaaccgagcaagtcgattttgttaggaatcactcggcacaaagacaaccaagagttagtatcgttctatacctacttgcgtctcgtatatagtgcgggtggctgtcggtgtaggtacattggtcacacaagaatcatggcgtctacggctgacaacgaggccgtcttcggagacgagttcgtggctgatgagatcctcgcccgtctgccggcccgctgcgccgtgcgctgcatcggcctctcgaagcgcttccggcaactcctcagaagcccgcacttctggcttcgccacctccgtcttggcgcgccaggcctggaacttcctcgtgccgtttgcctctacgacaaatgtgattactgcaagaccacctacttcaatgccgtcggccccgcgttcgccttcgagcacaccgtcaacctcgagcacggcagctggtacgccaacacctgcaacgggctggtcctcctggccgcccggaattccctcgacggcgtcgttttcaacccggccaccaaggaggaggtgcgcctgtccgtgccgtcgttgccaccgccggcggctcccgaggacgacgacggctatgtgctacgccgcttcttggggtttgggtacgcgccgtcgagcaaggtctacaaggctctcatctcggagtttgtagctgacggcgatagcacgaccacaacgttgatggttgcatcattggacagtgtcgtctgccagcaagtgccgaggacggtgttctcatgcgacaaggagattctcagtgagcacagcctacacacggtggacaacaaagtgtactttcttatatacacatcgtacttcaacgaggattgatatgaagagtatgagaccgatgcgacatccatgcttgttttcgatgccgacgacgaggtcgtcacaagcgtagctgtcccggaagggcaaccaattcaaccctgcaacatgttacagataggtgggcgtccgtgcatctacatgtgcacgggccaagacatggtgctctggttactcactcccgatcaccaatgggagaaggtatacactctggtcaagcaaagctctcggtcacacgattatttgttgggggcctgggactgcggaggtggccttctgtttgctaacttcaatattaccggtgcctacttgtacaacctccacgaggccattgaggaggaaaaggaagaaggcgattgcggcggctaccgcaggctggaggctgtctcattgaagaaccaagacgacatgccagagcatttaaaacatatcggggatgttccgacaaatctatatgattaccagccgacgctcatatcaccagcgagtatcttcggcgatgttgccttctcagaccgttttgaggtcactgtcccacccaagcatgagttggactggatcttcctggaatggacgcgcaagttattcgtagagccggcgacgcaaatgctctctacatcatcaggtgacatctggtctcacgcggaatgaccaatgttgttagttgttacccccgttggcaaatgacaggcgggcgcgcagaagaagggatataggagcaacgtatagcgaggatgagttgtcaagcatccatgagaaatgtgattctatcatatcatgcacttgatataccatgcatgcctcagcgcctcacccgtccaacttgttggaaattcgcgcacccattgctacgtattcatttgttgttttgtactcccttcgtttcgttgatatgtattcatttgttgttttgtactcccttcatttcaaaatagatgactcaactttgtactaagtcatctattttaaaatggagggagtacttctcctttatttgctcgaatttctatgtatgaggagctagaggccgatctcgttcggcaggatgctatgtactccaccaatgaagaagtataatccaatggtattttagttacttttaaacaaagcataatgtcaatgttttgtaatattataactcaaatgtaaatattgacttgcgtaaaaaatatgatggccaacacatactccctccaaccgcgccgcctagggtaggcgacacaggcggcagcccccaaccgcgccgccgccgggccccccttctccagctaatcccctcgccgccgtcggaggccaccaccgggcgaagcccgcgtcgtggcggcggcggggccttccccccatggcgcggctctcttctcccgcggggccccgcggctggcggcccgccagcggctcggatccatggcggcggccatggctggtggcacgcggcgcagcttggcggcgggcggcgccggcgtggacaggtgggccacttccctgtccatgtggatggcggggaggtggtggtcttcggctgcggcggcggttccttgctggatgttggtggcctggtgatgttcgacgtcgaccccgatctacttcaatctgcagcggatccggcccttggtggcttcggtcaccgttcttgggtgctggccttgcagatccgatggctggaagggttcagggggaatctcttggccggcgtggcggccactccgatggcagtgcctctgggtgttgcttccatcgttggaggcttcggagaggacctccttccttccacccctcccaggagctcaacctcagacttcccctgttccgagcgacgacgacaccacggtggcgtgctccttcctgaaggcattgctcgggggctgctcaagcggcggttcggtgtcgacatatgcattccggtcagcttcatcttggaggttgcggcgacgtaggcgatgctcgtctggtggagctactgctgatggtcgaggcatcatcgacagtctgcgccatcaggttcgggatgctcagggggaaaccccagatctgggtcttccggatcggatgatgatgacgttctatcgctttcccttctgggggcatcgtcttggagcaagtgctggctggagggatggtggagcggtgtttcatctcacacattgatggcggcggagatcgatggcatggcgctgtggagactcggcgtccgatgcgcggagatgggctcgcgcaggaggaggttgctgtctggcgtcatggtgacgtcgatggtagagtggccagacaaggtagaagcctcaatatgatctgaagacctgtggaagatggcggcgacgacacacgagtgcgtctgacaggattgtgccccagacccggtatgtggctcggctggggcttccgaatgagtttcggcttccggcttttgatgttaggcttaggtgagtggtttgggtagtggcccagctagcaccccttcatcattttggataggagtagcggcatatgttgccaagatgatggattcaggcacattgttgtaatactttgtaaggtcctcgagaataatctataaagtggccgtatgcatctcccagatgcagaggccgggggtcatcctccttttctaaaaaaaaacacatactccctccgtctcataatataagaatgtttttgacactacaaagtataaaaaacatttttatattttgagaccgagggagtacttatgttagattaaagtgatatccttatttattttatactctgtttttgagtcagtactcaatacaccaacgttgccaattaagctggaccgttaggcactcacaaaaaaaaaagctggaccagtaggtaaaaagaaaatgaatggctgtgttcattctgggatacggggtataaagagctctcaattaaaggattcatactacctttaaaagtaaaataatcgctccatagtgttcacaactacgcaacaaaagcaagcttgcctgccaatcgccgcaatcaccccgtattgttcgctcaagacaaccggggtcagcttggacggcggcgactactccaagaacgtcctggtcctcgtggcccctcgtccgggaacggggtctgacgaggcgccgagttaccgcacctcggagcgcacagacgaaaaaatacgccttaaagaaatcgagtgggcgctcatcacgtcatctcatattatgacgagatttggagatattagaacacatatataatcgaaacaaagctacccctacaagacaaaagccggttgccgcacatgtactgtttgcatctggtgcctagaaggtattaggcaaaaaaattaaatcgatttgaaactcttcgtcgtaactcattggaaacagatacttgctaaagcatagtcaggtacatcgccaatttattctgatacgacagaaaaaaaacaatcttcctaggagctctaatcttcccatggtggtgatgtatcttcatggcttccccagcagtggaagagtccgatgatcatttacagttagaacagaagcatagttcattagcgcatacaccatgtatgtacgttggtccctcaaatctggtacaagcagttccacatttctcgttatcagaatcagaatttgtcttgcactcaccatgatagtaagggttgatcttgaacatgcactgcgggtcagcttcggcagtacctaatgtaaatttcaaaacgggcccattagagagagagagagagagggggagagagagagagagagagagagggagagagagagagagagggagagagagagtataacttttcataaaaccgtgaaaccatggaccatttacttaccaaggcataggaagaatgctaacaccgatagagacacgactactattgctatcttgcaggccattgtgaaagcttgaattgaataacttgatgtgtggtaagccaaaaggtttgcagcgctgtctatttatagtgattatgatgagttttctatcgataaatttcatcagccattaactgatattctctacattcttaattgacacgcatttatctacatacacatgtatctagacgcgttttagtgtgtagatacatctatatctaaacaattatgcgattgtaattcatgtacgcacacacaatcgagaggagtaatggtggtagatatgttttctaaattaataattaataaatgccaatattgacttcttattttggcattggggacattaaaaacaattaaccataaaatatttcctaccattccgaattaattgacacaggtttagaccaaatattgcctaaatctgtgtagatccagtgaattgcatgaattaattcggactggatcaaaacctgtgtcaagttttacacacttatccgtgttcctccaagtatgtccatgttattgccatttggatgctaggtctcatataggtatttagagacagtataactcaaccaccaacaccctttcatagagatttgacactttttaccatccgatctacctcttcaatgctcaagatcatcttcgatccaccgaaatgtctctcgtaccgattcctcatcctcaattcacgttaactaggctggcccactgttatagggctgctaatcctcaggtcgagctgggcgacttgtagcaaattgggctgagaatactacaaatgggccactcttgctatcctaacaatgctggccagattttcgccacccgcatgttcgcctcctgttcgttgtactgtcccgtgtggagggctgcttcttcccgaggtcactgaccgcccacagattttgcggcctcctattcaatacgactcggcaactccctaaaaccgtagaacggtgagcggtcgggcagccgcctcgattcggcaacgacatgtcgatctgtttttttatgtggggtggcagtccgacgggtattctcctacgtctcgctgtggcgacggctagcggcagcgcacggttgtcctagccaaggccaggaggtatcggggttggggagatggtttggtgcaaagtgtaggcaatagttggggctgcgaggacgcaaatgagagaatcaagaacgtccgtttggcatctgacatatgcctccgattcggccgctggaatagcttcccaggacatccgtctcactatcagcccacaccggaaaaaaaatatctttgactaccaaccacatctgagacgcgtgatccaacgaccaaaaatggtggcggcgtgagagcgtggaaagggtttggttttactgtgcttaatagtcatattatgacgagattgggagatattacaacacatatataattgaaacaaagctacaaccctacaagaaaaaagacggttgctgcacatgtattttttgcatcttggtgcctcgaagatactaggcgaaaaatttaagtcgattggaaactcttcgtcgtaactcatcggaaacagatacttgctaaagcacagtcccccattgttgtatcatcgtattcagggaacccatggtcaggatagccgtcgcgtcctctttttcttcattgtctttcatcataacccctctttcttcgtgcttggtccaaactttatagaggggcatgaaaccggattcaaataggtggacgtgaatggttcttgatgtagagtaattatgaccattcttacagccagcacatggacaaggcataacaccatcagcccgcttgtttgcctcagcggcaagcagaaaagtatgcacaccattaatgaactcgggagagcatcggccatcatacatccattgttggctcatcttcattacacaacaccgaatagaccaaattaatacaagtttacacataaagttcatatacaacacttaattaaataaaacatataaataactctctagctaaagaatttaaatgcaacaacaaatgcgatcaagatcgcaactaaggtaacaattgatccaacaacataatgataccaagccacactatcaatggcatattttctaatcttctaatcttcaatcgcattttctccatcttgatcttgtgatcatcgacgacatcggcaacatgcaactccaattccatcttctccccctcaattcttttcaatttttctttcaaatactcgttttctctttcaactaaatttaacctctcgataatagggtcggttggaatttccggttcacatacctcctagataaaaatatctatgtcaacttgatgggcataatttgtcataaacacgaaatgcaacaactagttttaaaagagaatatacctcatccgaatcataacaaggacgagggccgacggggacgaatatcaaaaccatggcactatatataacaaacaacgtaccggtaagataattatacgagtaactatatatccaaatcacgcaaacatcaatttggtaatgtaaaacattcatgaacaagagcctcaccacaaggtggtgccggcgacaggacggtgcgggcgatcgatggtggttacgacggagatttagaaggcactaagtaaaccacacctacatatgcaaactaagtgttgtttttgacctcaaattgcatataaatcaaataatagcacatataattcctcccaaattactaaactcacaaattaatcactatacacaagattgcaagagataatctagcaatgagagatgaaaagacaaagttgctaacctttgtgatcatttgaatggatgggggccttcaaatcttgacaaattttgggcaaaatgtgtgatgagctcgaggaagaggggggaagaacagaggaggagaggggaaaggagaagaacagagcgagctcgggtggacgaagggtttatgtacgtcgacctttagtaccagttcgtgccacgaactggtactaaaggtgctggaggggccccagactgacaacatcctgctaccactctctttagtatcggttcgtggcacgaacaggtgctaaaggttcgccatgaaccggtactaatgagagcggcctgctagctgttggaaccggcactaatggacacattagtgccggctcaaaatcaaaccggcactaatgtgcttcacatttgagcctttttctactaatgtatcgttaaatttcatcagccattaactaatatctcctcggttcttaattgaagcacatttatctagatacgcatgtatctagacgtgttttagtgtgtagatacatacgtatctaaacaaatctgtgtcggttagtttggaacagagaagcacttatttataataggaattagtatatttgacatctattagggaatatatacctgacaccaaatccttcacacgaaaggatcgcccattagttcagcagcttaatatctcgtactatagtcgtccataagattgatatccattgcgatcgtaatccatgtatgcatacacgatcaagagcagtaatggtggtagatttgttttcttgtctaataattaataaatttcaatattgactttttatcttggcattggggacatttaaaacaatttaccataaaaaatttcctcccattccaaattaattgatgcagatttagacaaaatattgcctaaatcagtctagattaagagaatctacgtcaattaatttggaccggagggccgaatttaacaaaacttgtgccaatatttccacacttatccgtcctccttgacattttgatgcaatgtgtgatataggtgggtatcaaccacctacgccctcttgcagtgatttgacaccttttactgtccgatctacctcttcaaagctcaagataatcttcgatcggctgaaacggcgctcgaaccgattccccgtcctcaattcgcgttaactaggctggccgacagttacagggatgctactcctcaggtcaagctgggcatttttttggaaaattgggccgagaatactataaatgggcccagaatactataaatggacggtataaggaatagtataaatcagtttgaaagaagagaggaaaaaggaatgtgaacaataggaacaaaattagatgagaaaaatgggtgtggtgtaaagctctttgctgaagcatcttttttgttttgctggtccgctgttcagaaatccaatagtatttccgtggaacgctgcttgctgcaactccacttgatccaataggagtaaaatgcatcggtggttattgaacttgccgtatatgcttactttggtcactgtatttaagaatacggtcaatacgatcactatatattcgttgtggtgattatacggtcactgtcacaccatatagcttcgtattttatttatttgaccggtcaaacagtcacgatgatgccctgtcagcccactttctctctctactttatgcgggtcccatctatcagtcggtgaaagaaagaaaataagaggcaaaaataaaatgtgcatgtatgaggatttctaacacagaacattactgtggtagcaacagtgggctagccaattgagcgcataacaattttggttaacttgctgagcaattttttatatacgttagcgagaatgtatatagtgcacacactcagcacgcacgcacaccaggcatcatgacaagctagcgatgcgacgcggccgtggcgtacacggtactggtcactctcctcttcttccccatcgtctttttcttcaggccaactccaccgccgaccctatcttgtccgtccctgtttgtttgagataaaagggacaaacgagacggcccaacgcgcaggcgcaaacggacttttgtctgttttgtgtctgctttcgatccatcgcggcccaagtttgcgtcgttttttgggtgaaacaaacaccacgcggacgtgcgggtcgtttgcgcgtgtcctcccctggcccgcccgtcggtagcacaaggcgggcctttttccgccccctccctccctccggccgcaccccctccactcttccccactcttcccctcgctgccgccgccgccgctaccattgcagccgtgcagttcggacgcgagctcggccaaccactttccctcggcgccgccgagctacccatccacggccacctggtttgcgcacccgccggccggttttggggcggatccgatcggtcttgacctcggccgactgtgggaggccgggccgcgccatggactggccgggcacctcgccggaaggccctggcagggccgcaaggccatatgcacgcagtggctcctcctctagccgctcggatctgcaccgtcagtggtccgccagcagatacacgaatggcggacggccgggctcggtgcttgcccaaaagctcgccggcgcaccgttgccactcattaagtgcgaccactgcccaaggatggccgtgcgccgcgtgtctacaacgccggaacatcccggatgggtgttcttcaagtgcttaaacgatggggtatgcgctttttttagcttcggtttgtgctatagatttgactagttgtgctaacttcaaattatgttgtgtagaatggatgcaagttttgctattgggaagaagagtacatcgatatattgatagagagaaatgtagtgcatgttcatgcacttttagctagcctagaggctttagataagagaagtgcacttgttgctagattagaggctaggcacgatactacgtgcgaagaagcaacaaggcacgatactacgtgtgaggaagcaacgtcgacttctggcttgaagaagaaaggagtgtgcaacgtcgagcctcctccacagatcaacaatgcgtgcatcgagaaggccctaacccaactcaagggagcagttatggaagttgggtatcctctcaaatgtattcttgtggttcttgttttctttggccttgctttactagtcaaaatgtaatgatgtattgtcatgtaccaaaatgaatgatgaaataaagttaaggacttgcaaaaaaatatacgcggacaggatggggcaaatggatgcggccgcgcgctgggcgcatggccaccgcatcccaggacatgcccggacacgaccccaaatccctacccaaacggacagaaaccggacaaaacggacatctgtttagggtcgtgcgatggagttggcctcatgcctgcgaccaccatcacctttgtccaggtctggccaccatccggcgccacatgtctgtgctggccgttgactcgcgcacaagctgtcctcttggcgcactcgtgcagctcctcgctgcctctgacttcttctttctcaacgccttcgccttgtccgtgctcactcagaccgcacgtacatcacaagtcgcgcgcacatacatggcaagcatcttgttcacacatatcacagtcacgcacaacaccacacaaacacaaacatgcacgtacccacacaagtacgcagcacaagcaacggccaccctgttatggttgtcacgtgaatgcaaataacatataataaaaggcctatctataaattaaacgcgaactgaagttggctcggctggctagcgtgctgcactatcagcacgtcgttcgggttcgattccacatttttagagggtgtttgttttcaaggacttattgatttagggactttaaaaagttcctataagtcctatctaaaccaaacaggagagacttaaaatgggtatttgggacttatgaaataagactcccaaggagagtcttatagggacttatagttgtaatatggtattttagttcatgttaagtcccaggaaccaaacaggtagagaatttttagggacttgggacttataagttgggactaaaaaaaagtcctaggacttatgtcctaacttataagtcccaagttcctaaaaagtccctacctgttggttcctgggacttaacattgactagaagaccatattacaactataagtctctataagtccctccttgagagtcttattttataagtcccaaatgcccactttaagtccctataagtccctcctgtttggtttagatgtgacttatatgaacttttttaagtccctaaaccaataaatccctggaaacaaacaccctcataatgatcgtattgaccgtattcttaaatacaatgaccaaagtgagcgcatacaataagttcaatgaccaccgatgcatccctgcaaaaaaaaaaccatcgatgcattttactcatccaatggaacatataaaacgcgctacgctacccgccatcctggttcaactgcgtcgctcgtgcgttctggtttgcacgatttcactgcaataggattttttatagtgctgtcaaagccttagccgttggttatttatgactccttccttttgttttattgcatgatgggtgggtcttgaatatccccgggctcaacattctcgtgtgccctgtgtgcgttctgtgtgagagaaaggggagacgtgggatggatcgtgctgagtggtgaaaacctagcagccagtccctccgttcctcgagccccgctgccctcccctgcaactcaaatgcgccgcctccttccctccctctcccctgctctccactgcgcctcctcctcctccccttcgcttcattctacggcggcggcctgcaggtaaagggcgacggtggcggccctcgatttgatctgtgtgagaaagagaagaagatagggagagagataacggaggagaggatcactagtagaaaaaggatcatacgtgaagcacattagtgccggtttgaatttgagtcggtactaatgtatacattagtgccggttcgtggggccgatcaatagcaccggttcgtggcggatggaggtgccgcggcggatgggagagggtcaccggaaggagcaccgctggctcgtcgtcatcgcgccggaggagagatgcctctgtacatccctcgcgccagcaggttcctccttccgtcctgctgctcccctctggcgccgccgcccttcccttcctccatctccgcccctccagcgagccgctcctcttccctgcctcgccggcttcattctctgccgctatcctcattggccgtcgcttcaggttgcggaggaggatctgccaccggatctcgccaccggatccgcgcagttgagggtgaggaggatggaggtgaaggaagcagcagcaaggatggtggctggtgatgggataggggccaccagaggaggggggagggaggcgacgccgcgcttctcgccacctccacgtcctcgtcgcccagtagtctgttgctccttgtcttgcaactccagcgacaacagttcgtctccgtgatccttttgctcctcccgcttctctcctccatactaaatagctcaccaaattagtctgaacatagcaaggtaaaaaaaggccatccattctcatttttcttcactgtattttttcttgttcatacctttagaaaaaaggtggcagtgatgattgatttaagtatcatgtttgcttatatggaaataggggatttacttccgacaatgtgggtagtggtggttttctctgcactctcgtgtttcataaattttccccttggacacccacttatctgaaatatgtgtcttaccaacttgatgctggctcacctgcaggttcagtgagtagcgagcatgtataatgactactgttgatctttgtattgtgagacaatgctttccagcttgatgagatatggtcatttcttaaaaggtagatctattacatattgattgaaaatggtgtaggtgtgctcttttgtgaccacctgatgtgatgtttatttttcattgcaaagtcattgtatataggataaggaagaagttttggagactctaatgtttatgttacttcccattgtgttgtttttgtttgaggctacaacatgcagatatagtgaactcgctggtttttggtgaactaaaaattgtaaacaaatacactaaaatatgcttgcattgataactgtgtttactgttagatttgttgtcagataaaatcatggcttggcccgatggtgaccatgttagtctgcttactgttcctactatctacactccatggaataccagcccgtttttaaaccggtccagaagtcacgacaaaattgtaggcaccgcaaataatatctttgcatattgctcgactcctttctttgaattttctgtcagtcgcgtgtcaatgcacttaatgtgcacacctactgcaaatttttattatcttattccttttatctcctttttattagatgaatttaggtctgattggcttctcttttcctatgtttgcatttagttaacttgtcatataaaaatgtcggaattagttacagaactgcagtctgaaagatgaaggatagcatgctatccaagtttttttgtcgaaggggatcattgctcatgattccactgtagcatgattaataattactcaccctatatctgcatgtagtagcctcaaacatcaacttttttcttatgtttttcctctagcatgttgctcgcgggtttcgatattgatttaggtagaagttctttagtttagggcagggtccaactctcagttacatacgtggaccttctggatggctgtcgtggttgtttggatccgcttttatgtagggagactgtattccggtcctaaaaagaataaagttgaagtaaaaaggtattctttggcttcttgggtttctctttctatgtctctagggacggatcagaaggcatttcttttgcttttggtgttgcggatgcagcaacctatgcacaaaatgagggtactagacaacaatgcacttttagatggtacactggtgctgatgaatcaatcttttttgttatctgctttatgcttctgaaagtgtgtgctagcttatctattatattcagagaatactatatcacacatgtagtgcatattggatattttcacttgccgaaataatttgctacccatggtggtagctacgcacggccccaatttttatctctaattatttttgtaaattattttggactatgaaagattactctataaagaaaatattgtgactttggtgtttcagttggctatattttcttaatcgttcctatttttggacaatcttctgcttcagttttttagtcagtgcaaatatatctgtgtaaattctcataaagatactattggtgtttcagttgtttacagtatgacccctcccagagcaaacaaaatagcaacaccggagacgttttattaattgaaacagacatattgtataaagaaatcaccgatacttcaacttatcaagggagaagaaagcgaattggggatagaggttttgggcctgaaatgctatgcctccgattcacgtacgcctctctttctgttttgactcccataatttttaagttgggcaaatatcacagaatggtggttggcagctaacatccaaaattcttagttatgtctgctatcaagaactatctatgcttgacatggtctttgtggtgcctgaagctgctacggcgcccgcgggtattcttccccagccccctcgctacttcccctctctatgaatcctctacttcttttcttttagctcatgatctgctctgcttgttttggctcctgtcattgatgcattattctcttcgttttcatgtgccccggtgcctatgttgagtggcagtgacaaaatccatctttttagctgaggcatgttggcagctgcagcagcctaacaattagtcctcattcaaggtgatttacttactcccctcccccttatgtatcatgaacgggtagatatggtggttgcttatagcttcatgtatgggattctatttttggcgagagcatgatagtaccatatcaactgggaatagtgaaaccaaaactgtacctgaaatggcgagagctggcctttgaatttttttcatagttactctgttttttcaaggctaataatgatgggtatattgtacaatcactgaactatcccgtgtcttcaaagtatgtgtgtctacaagcctacaacatggtgaatatttggttcatttggtattcataaattcattaatgtccagtaggaagcaacatgaatgcaatttgtgttttcttgggtgacctcagtttcctaataatatcttcacaacatccagatttttgtcagttaacttgtataaaaaggctcataaactttttggaagaatggaattagtgaatatgaagttatatgatcgatttgtctactcctatttctatgctacatttgttgttcacacgctgtaaccagtggtacttttcggcattgtttcaaaaagattgtgtgctgcacgaaccatgaaataccaatgtgttcatagtgcagcatgagagtgttaaacatatattgtacaggttggttggcgtggccttgtggttcacgtcatagttagttaggaggtttaagttgtcatgtttatctctatcttatctccaaaaccctcctgtaaaatctctgatggttagcctcgacgctgcctcctcctgtaccgaaccccctcgatcaatatatactctgcgggtctccgtgtatggagattgagacgcttccataatatttcacatggtatacagagcaggcctcttccacgacatctagctcatccccttccatccgtttcttccccagaaccaccacgccgcacccatgtccacctcctccgctgttccctcctcgggcctcaactacaacacttcagaacctctcagccggacgaactatgtcctctggcgagcccaagaacgatcccagatactgggcgccggcttgtttggctacatagatcggactatcgtggagcctcccaaatcaatcatcagcaaagataaagatggcaaagatcaggtagtccccaaccctgctcacaatccttggctcgtccaagatcagcaaatcgtagcatatcttcttcgcaacctatccaaagaggtgcttgttcaagtagcctcgcttgaatcatcacatgcgatttggaccgcgctagcaaacatgttttctgcggtctctctgtctcgtgtcaataacatcagatcggccctcacgaacgcccagaaggggtcacagtcggcctccaccttcttcgggcagatgcgtgccctctccgacgagcttgcggcggcaggaaaaccgatcggggaggacgagctcatctccttcatcgtcgccgggcttgatatggagtatcagcccatcatctctgcactcgacgtccgcaccgagcccatcaccgtcgacgccctcttctcgatggtggccaacttcgatcaacgcgctgagatgtttggcagcgctggtggcttcaagtcatccgcgaacgccgcttccagggggcggtcgagtggcggccgaggcggctaccgcaaccagaagcaaagtggtcgtggcggcggctacgctggtggtggtggccaaaaccctagcagcggctatcctggcacgggtagcggcggctacaaccaaggcggcggtggctacaacaacaacagcggcggccaaagcagcggccatcgtggcggcggcggcgggggctactacaacaacaatggccccccgtgccactactacaacaacaaccaagggggccgtttcaccgggtatgatgagtatgaaaacaaatgccagatctgcaagaaaactaaccacattgccaaagaatgtaagtggcgttatgcagaagataattccaggaaaaggcgtgttgcagctgcggcagatgcctcatacggagttgactccaactggtatcttgactccggttcaaatgagaatatcacctctgaactagagaagatgaccatgcacgagaagtatcacggccaagatcaagttcacaccgctgaaaacggttcaggtatgatgattagtcatgttggagagtctattattcaaaccccataccgtgatattcttgtagatgatgtacttcacattcctaatgcatccaaaaatcttctgtctgtacatcgcattactcttgataacggtgttttcattgagtttcatcccttcttctttttgatcaaggatcaggtcacgaggagggtgctttatcgcggtagatgtgtgcaaggcctctacccactgatccccacaatttccaagtccaataaacaagcctatggagtctttaaagtgtcttcagaacgatggcataatcgtttaggccacccttctttttcaattgtttatcagattcttagcaaaaataagctcgcttttgttgatgagcatgatcgtgaaactatctgtgactcttgtcagagagcaaagagtcatcagttaccataccctatatctacaagtgtgtcgacaaaacctttgcaacttgtgttttccgatgtttggggaccggctccctcctctgttggtcgccatacctattacgtgagcttcattgatgatttcagcaagtatacctggatataccttcttaaaaaacgctccgatgtttttcaagtttttcttaactttcaagcattggtagaacgacagtttgactgcaaaatacttgctatgcagtcagactggggaggtgagtatgaaaaactcaactctttcttccaacgtataggaatctcacatcatgtctcttgccctcatgctcaccaacaaaacggttcagcagaacgcaagcacaggcacattgttgatattggcctctcccttcttgctgccgcgtctatgccactaaagttttgggatgaggcttttctcacagcagtacacctcataaatatttttcctagccgtgtcatcaatcacgaaacacccaccgaacgcctccttcacaccaaacccgactattcacatcttcgagtgtttggctgcgcatgctggccaaatctccgtccttatcacaacaaaaagcttatgtttcgttccacacaatgtgtgtttataggctacagtgcacaacacaaaggcgtcaagtgtcttgatgtagccacgggacgtgtgtatatctctagagatgtagtctttgatgaaacggtttttccctttgcaaaactccacccaaatgctggtgcattgctccgcaaagagatccttctcttaccctcttccttatccggcgttgatcatgggggagagaataatagtactaatcaacttgcctctaatcatcatatttttcctgagattcctgctgcagaaactagctcaaacggtgaaaattcaaggcaaaacgggcaatattttatgtgccccccagctggagacatggacacgcaccgaggaggatctgcctcgggatcctcgcggcaggagacactatcctctccaggatccgggcggacagggcagccaacacctgggcgtgcctcgggtcccgaacgctcgcgcggtcgcgaaagcgacgtcgacgtcgctgctccgcacccatcggctggtgacacgtggcgggaggacactcgcgcggccgggcctcgctcgcctggttggcccgcgccggattcgtcggggcccgccacctccgaccggctgcatgcaccagagtcacccgggcccgctgcagactcgctcggggccgccacctcgcctcgaccgctgtcgccagcaggcgcgacagaatccccctcgggatccagtttgccagcgcctgatgcggatggatcccctgcggcttcgcctcctatggcttctcctgtggcgccacgcacaaggctacagaagggagtaactacccgtttaaattacaaaaatttctctaagattggtatgtcttgcacaactggtgagcctaacagtttaatgtcagcacttgatgacccaagatggaaggccgccatggaagatgaaatcatggcgttgcaaaaaaataaaacatggcatctagtgcctccacgaccaggaagaaatttgattgattgtaagtgggtctacagaatcaagaaaaaatctgacggcaccatagacagatacaaggcaagacttgtagcaaagggattcaagcaaaggtatggcatagattatgaggatacgtttagtcccgtagttaaagctgcaacaatctgccttgtattgtcaatagctgtgtccaggggatggagtctgagacagctagatgtccagaacgcgttccttcatggtgttctggaagaggaagtgtacatgaagcaacctcctgggtttgaggataaaagtgcaccatcatatgtctgcaagcttgataaagccttgtatggtctgaaacaggcacccagagcatggtactcacgattaagtatgaagcttcagtcgcttggttttgttccatcaaaatctgacacctctctgttcatttacaataagcatagaacatccatatttgttttgatatacgttgatgatatcattgtcactagttcttctgatggagctgtgacagcactgcttaaggatttaggctctgagtttgctctgaaggatttgggagatctgcatttcttcttgggtattgaagtcaagaaacatagtaatggtattcatctatctcaagcaaagtatgctactgaactgctaagtagaattggtatgcagaattgtaaatcctcaccaacacccttgtctagttcagaacccttgtccttgacagaaggagaaccgttgcaccaagaggacatcactggttacagaagtctagttggtggacttcagtacttgactttgactcgacctgacatctcttttgcagttaataaggtgtgtcagtatcttcatgcacctaccacagcacactggacagctgcaaaacgaattctcaggtatataagcaacactatacacttgggtctcacactcagcaagtcatcttccacacttgtcagtgcattctcagatgcagactgggctggttgtttggatgatagaaggtcaacaggtggctttgccattttctatggatccaacttaatatcatggtgtgcaagaaagcaagccactgtttctagatcaagtacagaagcagaatataaagcactagcaaatgcaacagcagaagtcatttgggttcaatccatgctcagagaacttgggataaatcagactcagccaccgtgcttatggtgtgataaccttggtgctacatacttgtctgcaaatccagttttccatgccagaacaaagcacattgaaatagattttcattttgtgagagaacgtgttgccaacaaacaacttgagatcagattcataccatccaaaaatcagcttgcagacggatttactaaagctttgccagtgagaagttttgaagagtttaaacgtaatctcaacttgtcatagttgtgattatgggggagtgttaaacatatattgtacaggttggttggcgtggccttgtggttcacgtcatagttagttaggaggtttaagttgtcatgtttatctctatcttatctccaaaaccctcctgtaaaatctctgatggttagcctcgacgctgcctcctcctgtaccgaaccccctcgatcaatatatactctgcgggtctccgtgtatggagattgagacgcttccataatatttcacagagaggagtaagtttgctacctttgcatgcctatttacttttgttacttttgaaactcaacatgaagattttcagaggctttttatggatttgacagtggtcagtgccagattataacctcaggatctttgttcttaagtgatgcttcttgtcaagcgcaagattttattcttctctaaacgacctgatttagagacattttgaggtgtttgcccaggtatgatcgttaatattcagtgacaggtgaaccatatatttctttcatttaattcatgctttgttatctagaaactaaaaggtcctgtatacagatactatcatgccgtgaaagtgtgatatctttaccccctgttttggaatgagttgtcaaatcatttaaaattttgtattactctactgttcagccaaacctttgatcactaatggatgacgcttgatcttacttttgtttactatgttattcttggttccaagtacaaatccttactttcagttcagttccaagtagtatgctagatatatggacgagttggtgaaaaactgaaaaccaaaaactactgtatgggttaattaatcgtcaccaaattacctatgacttttgaaacatcgtttttttgtttgctttcagaataaaatagacttacttaattttaaatttgaaaattagacatagagctatgagtcaatgtactggtttcacaagctgcattgtcatattcacctgttctttggaaataaaaaacaattagttggttttaggtttgaatgtcaggcaaaaatcgaatggggaaagggagctcgcagtccggattctaattgttatttggtgatgtgattcttatttctcctcttctaatattctttataaggtattactgaatatatatggtttgccctaaacaagcatatacattagaatacacaggggaattacgtccctgttttatgttgttttttctgcttgctattgtttgtgatatggtaatagttttctttggtggtacttaattgtccctggtttttctgttgtttccatacatgttaatcgggataacatatacaaaggttgtgtaggtaatggccgcaacagattttaattgcatgatcttactgatgtacacctgacacgtatgtactgtctaccaagtgattgctcatgtgttggttaggaagcatatgtaggtttagctaataattaccctgctgcctttgtttcaaaagtaaaactttgctatctttggccttgcctctaggaaaaaaaacatcaacttgaaactgaaatactccagatttacttgctatcttttagaagtaatattgtgttgtttgtcaaggttcacttggaagtggttgaggcagcctgacctggtgaggatccacccgaggaactgacctggtggcgcgatgcgtacaggggaggaaacatatcttgtatgtgagggagtaggtcttgcaactgaagtcatctctccgatgcagaggagtagaggcgatgggggtggaactatggaaactacagggtgagtgagagagtggaggaggggatggataaggtcaagtaatcagcaagtgagtaagtggatcaacatcgtctggtcaagtaactcaggtcggccgagtaaactgaatttatcatttgtcttttgtaagccgacaacacggtttaaatatgtattgggacagctaaatccgataaatgaaagaattataacgcttataacggtttataaaatgaattagcaaagagcatggccaagtttagtaaattttagaatgtggttgtttgttattcattgttaggggttggcatttgaatctttgttagggattagcatgaatattgatcaaaaagtatttgttgccaaagttgtggcggtttgaaaaaattgttggtgcattgttgtggatctcaagatggctatgtttttatattttgcataatcacttcgaagaccttgacaacaccgtgggttagtaatttgcttgaaaaggaagctgaattccagaaattaaacaatgaagatcatgtgttttacacggtttaatccatgtgtgtgtctttaggtgaatttgtattgttatgtgtgatcatagttattatttatgttcgccaatgtcatgactattatgagcaatgcaacaatgttaaaaagcttgaaaagcttgaatgcatccttaaggttactatgagattaaagataacagtcacacatctcttttcactacaaacaaatatgcatttctttttggatctttaagtgcttccctttttatgttattaagaatatggccctaagtggctgcatttagttctttaatgaaaatagagaaaagatgtcgatcttttcaggaagaccacaacgttgatgtcttttgttgatcatcggtctctaaatattcttgcttgcatggttagttgtcgccctttgcgccattggcgcaacgggtcatctagtactatcagaaatccaacaagtcaaggtgtagcacggcctctggtcaccatccttcctcagtggggagcacggcggtgtcatccttggcgcacacgcatgagcggcgattagcgacggcgcgtcacgacgcggattatgcttgatgcgcagcagctgaattgctatgggtgaatgcataagagggaccaaaagactgaaacccactctggagcatggtttcaacataagtgaggatgagcacaggctttaccaaaaccaggatcaacagtaaggaataattgatttgcaaaaaaggatgcaccagccgggaatcgaacccgggtctgtaccgtggcagtaccaaaaccaagatcagcagtaaggaatagttgatttaaaaaaaacagcagggaataatttctcagcatctctgaaacaggctaagtcagtgggtacaaaagcatgtgaaggaagcgccgacgatgaacgtcgacaacctgattgacaacagataatgttgctcgtcaaggccttgccaagctaatgaatacgaagcaagtgtgagtatctatacaagctgaaacacagctgacaaaacaggcgtcgatcggtcggtcgacaaggggctcggctctattcttcttctgcaaaccagaatgcaaatatgactgaaaaatggcacagactacccttgaagagaagatttaataacttttgtatgttttggctagaaaagaagatttaatttctttaatcagcatcttttttgctgcaaggattgttcttctagtttagtcgtaaaacaagatttagtcctgttgttagttacaagaacaagaacataatcccgcaaaacaaaacaaggttgcaccagccgggaatcgaacccgggtctgtaccgtggcagggtactattctaccactagaccactggtgcttttgattagggagctctactaatcatcgtcaggatgactaccatcaaagagttaactacgcacaactatcacaattatggctacgttaacggactgagtactaaatctggttctggttgtcacacattgctctgattttcgtttgaccacattttgtgaggaaaactaagcggtgggctcactggtaagggctgatgtcgaaaaaataatccacgtagccatctctctctttctcctcattgccaccctactactccttcctttcccccctcgtgcttgccatcctcccacgttctctccatcaactcaaacgtcaggcgtctgcctggcacatcacaacatcacccaaagggtcatgaaacactagcggcgtgtgccaaggcagtctgctctgatgatcccttggcatctttagctgtggacactcacgtctcaaattggatatgtatcattgcgtgggtctcactaaactcgagagggagagtaattggacggagagcctttgaatacttcgacaatgccaaagcactaatagcggttgctggcaccgaaggagaggaagggtggctcgattcattgggatggccggatcaggagaggaaggaggggagggggcagtcttggtggtcgattgttctcttggaggcttaaatagccacacccgacgtggtcattgcttacgctcgccgatatgatcggtggccgcgcaatggatgtggggcttcctgtgcaactcgatggaccacacagagaggtggggcatgctcatcgtcagcgtgcagttgaagaggagcacaccgcgagatcagccaacatcccacgaaggcttggtggacttgaggatcatctcctacaccattgctaccatgataccaacaacgggcgtgacaacaacccggtgatggcagtaacaaggatcccaattgcatgggtgtctggcaagccatcgaagagcaaccgggcatgcgcgttgcgtcgagcccttgtgacgctactcaacacaaacgccaacaacttctatgtcatggtataggaggtcactggcatcctcgcacctatcagcccatatgccgaagcattgtgtagggggaacatgctatataacaaaattttaagctatacgatcacacctaggaaaactatgaagaggtggctaacgatcaacctcaccaactaccaaagtagcggaagcagtgtagaagttggtgaagtgcgacgatttcgtagctagcttataccttccaaccatgagaattcctctgagaagatccgccaatctagagtcgaagtagacccgccgatctagagtcgaagtacacgaccccctaaggtatccacgcgttccgaactagtaatccaacatcacttcggtccaggaagaagagctcatagaaaattagagagaaattagcctatcgacgctctggaataattagaagtctaattctagttagaccagaggagagattagagcgaataggtatgctcgagggctcctccaaaggattggtttatctctaaagggagccctccccacatatttataggtggaacaagggccaaaggggtggccgagttagcgagggagatgagtccctttattggttcggctgaaacatgtggaggactcctcctcccccaattggttttgccccttctttatacatgggcacccctatggggccccttttgtcccatgtgggaccaatccctttgggctcggccaagggttttttcaccctataaccttcgagacctttcataaatagattgaacttttatacacacttattatacgctttcaggactccagagacactttcggatccatctgaaacacttatagaactcattctctcatactctatggtctcctagctgccatataaattattagtcattaagcatgtgacactgcagattcaaagataagtggacatgacccggaacaccttccggtcaatatttaatagcggaatcttgacactgatgactctatattagtcccatttttaagggatgcccatcatgcatgatatccagtttatactccttttattatgagcattgcgtagtttttagttattgttagtttttattagaagaagacatccatatcatagtctacctccatcctttacttgaactccccaacaataccccgcctcttcctcctaacaatcaccattttctaaccctataaacctcttagtggagccaatggacctagcaactatgccaccacccttcagtgatgtgttgatatgcccgatgggtacaaattgggcattgatacccattgggtatgagcacgggtatgaatttgtccccaatgagaagggtaagggtagaatcttatacccataagaaacattgaaatgggtatgagattattgtacctgcaccgtactatactcattgccatcctatgtgcattcgttatgtgctagcagggccggtgatgctagttttgttactttccctttagcaaccactattgtcggggatataccccgcggcgtaaccaggccggaaagataacccagccggacttggcgactcaccagagacccggctgatacttggcgtttcatttataagccgcccgaagattggccgctcacttgtaacccagcaggtgggtcagacggacaacaaaagcccaaggcccagacggtcggttcatgatatggtgagccggtttaagaggaaagcataaagaatattcccttacaaaggaagcaagactaggactccacttgtaatagagtaatcctaatcctactaggacttagtcatgtaacccgccccttcaacttatataaggaggggcagggctccacaaagagggacagacaagaagaaacaatctctagggctagacacaaagggggagccggcttatgcggcgactctctcatgagcataatgagatctagccacaaacaacatgtaggtttattaccggatgatgtttcccggggcccgaagctgtctaaatccttgtcttgtgttgcgtctctcgattccgctcaacccctgtcaagctactgcaaagatgctctggcctcatgactaagtcctcacactaggacatctgtcgtgacaattccacgacagttgacgcccaccgtgggactcgagcacggtggtgttgagttcttggagggatttttcccaggtgtcgagaagctcgcgatttatctgatgaagaagaactggcacgggaaacatgcacgataacccgtcatgagcaaccttgatttcatgggaattcagtccaatggtcatcaacaaaataacagcggctctatcgctgcaccggatggctagcatgtttactggatatgcttgatcgtatttactgaaagtatgggattttttccggccagcgttcggagatttgaatcgcccggggtcgagatcgacagagtcatcgttgtcagcgtcggttgtctccattgtttatttctcaaaaaaagaaaaaaggttgtctccattgttttttgttgtccgtatcgttgtccaactcgatcggctcctgggcaaactctgcattgatgagtacatgcaataaaaagcaagtccgagtcctaccagggaagcaagtcccgatagaaaggaaaaaaacaagagggaggcagaaaatcagctaccggccaaagcagctggtaacgtggccaaacctcaaaaggaaaaggaaaaaaaggggtgattcagatccgggtcccaggagagtcaactatgggaattcgcggactgaacctccgcccatctcatcttcccggcctcgccccgtcgcccgcatgggcacgcacggcctcactcgccctcgctccgggttgttaggggacccacagcggtcgccatcattgcggccttccccgcggcgtcgagccactgtggccggcgtcgaaccatccgtctcaagcgcgcgcgtccctgccacctcgctattgctgtaagccgccgtcgccttcacgcttggcctctgccgcagacggtgtcaaaccagcctgtccgagctgcggtcctcgctcgagtcgccgggactccgtacttcattcagcccgcggctgcggttccaccccacgccgtttggccgccgccgttgtctcgcgcctcgagccggttccaagccgtttcacaagttggccgcctcaagcactgccgagactcttaatcacgattgtcaataatcagaaatcaaaggctgttatgcgtatatattggtgtcatcatttttcaagctctttgaatgatcaaaaattcagttaaagatggactgaaattttctgctagtcatttggtttgattccccaagacagggataattagttactgctgctgcacatgcgatacatgccgaagtatcagaagaagaaaaagacaaagcaatcacgacccggaaaggacgtggagggaggtttggattcagactctgccgcttgtggcctcgtcggatcaccccgtcgccgcatttccgttgatcggctatcgcctcagccaacgagccgccgaccctatggccgtctgaaccgccacccctaccgaccgtggttctggctctgtcgagccgcccggatccttctggtgcagattttttctcgtcggtgtcgacctcgtgcagactaagccgtgtccgcagccctcatctcaatagtaacctgcggctgcttctgccttaagccgtccggattgggccctgctgtaacctgtctcgcctgctgtgagccgtctccgccgcctcgagccacctgccgcctcgagccacctgcgagccaatttcaattcaagtcaagctgaaagctgcaaatcaagtagcagaccgtcaccgtcgcaaagctacctctgcctccccgcattgagccgctgccggagagccgccgtctgccctcaggttgacttgcgtccgattcaagctgttcaagtcgccgcctccgccgtctcaaacgcgctgccgctgtagttttcgagccgccaccacgatgatgcctccgtttcactgctatgttgagacgtctgggccgtgttgagccgcctctgctgttttaaaccgcccgggccatattgagttgtcggtctgcctgagccgcctctgttgcattgaacggatcagccgtcatccgaacaatcaggtgatatctatccatttaattttatttatttagcatacattgctttttgtcaaagaacaattactctggcttgcgatgtttttgatgcaggataattgttcactacatcaacacgaagtgattggctcgcccgtccgcgcggcttaccgcgcctgcgattgactcgcccgaccgcgccggcttacaatgtcgcgatcgactcttctgtctgtaccgcctctgatgctacggtcgtctttaccatctgtctctcgtagcctagtccacatcaacatatcgggccacacctgtctgcgtgagctgtttattgagtatgagcaagtcactgcttggatagcctggttttcttttaaaaaattggaggcaaattagcatgtattatcagccgccgtctgcactggatggctcaatgggcaggcgcacaagtcgccgccagtatagtttggttaacttcaaacagccagtttgaaggaacgtccatttgccgagttgctgacacggctcatacgagatcatttataacccgttgcagtcacctcaacattctatggattcacatcgcgctatcaatgttggggaacattgcagaaaattaaaattttcctatggtttcaccaagatctatctatgagttcatctaagcaacgagtcaagagagagagtttgcatctacataccacttgtagatcgagtacggaagcgttcgagggagtggtgatgatgaagacgttcccaacgtgattccgatcaccgatgaccaagtgctgaacggacagcacctccgcgttcaacacacgtacgggacgatggcgtctcctccgtcttgactcagcaaggatgaaggagaggttggggaagacaactccaatggcagcacgacggggtggtgcagttggtacggcagttctccggcagggcttcgccaagctcgcgtggagaaagagaggtgttggggaggggaggggctgcgccttcaatggtgtgtgcagccctccccccacccctctatttataggaggaagggagaggggccggccccctctagatggcatctagaggggggggcggcggccaaggggaggaggaaaggggtggcttgccccccaagccaaggggggcgccccctttgcccctttagggtttcccctccccaagccctagccgcatgggcctaggtggggaggcgcgcccagcccaccaggggctggctccctctcccacttagcccatgtggccccccgggaggggtggcccctcccggtggacctccggaactctcccggtagccccggtacattaccggtatgcccccgaaactttccggagtccgtttaaccactttccatatataaatctttacctccggaccattccggaactcctcgtgacgtccgggatcacatccgggactccgaacaacattcggtaatcacatacttgtcttcctattaaccctagcgtcaccgaaccttaagtgtgtagaccctacgggttcgggagacatgcagacatgaccgagacgctctccggtcaataaccaacagcgggatctggatacccatgttggttcccatatgctcctagatattgtcatcggatgaaccacgatgtcgagggttcaagcaaccccgtatgctattccctttgtcagacggtatgttacttgcccgagactcgatcgtcggtatcccaatacctcgtttagtctcgttaccggcaagtcactttactcgtaccgtaatgcatgatcccgtgaccagacacttggtcactttgagctcattatgatgatgcactaccgagtgggcccagtgatacctctccgtcatacggagtgacaaatccctgtctcgatccgtgtcaacccaacagacactttcggagatacctgtaatgcacctttatagtcacccagttacgttgtgacgtttggtacacccaaggcattcctacggtatccgggagttacacgatctcacggtctaaggaagagatacttgacattggaaaagctctagcaaaacgaactacacgatctttgtgctatgcttaggattgggtcttgtccatcacgtcattctcctaatgacgtgatcccgttgtcaatgacatccgatgtccatagtcaggaaaccatgactatctgttgaccaacgagctagtcaactagaggcttactagggacgtattgtagtctatgtattcacacgtgtattacgatttccggataatacagttatagcatgaataaaagacaatcatcatgaacaaggaaatataataataatgcttttattattgcctctagggcatatttccaacagtctcccacttgcactagagtcaataatctagttacattgtgatgaatcgaacacccatagagttctggtgttgatcatgttttgcccgcggaagaggtttagtcaacggatctgcgacattcagatccgtatgcactttgcaaatttctatgtctccatcctgaacattttcacggatggagttgaagcgacgcttgatgttcctggtcttcttgtgaaacctgggctccttggcaagggcaatagctccagtgttgtcacagaagagtttgatcggccccgacgcattgggtatgactcctaggtcggtgatgaactccttcacccaaattgcttcatgtgctgcctccgaggctgccatgtactccgcttcacatgtagatcccgccacgacgctctgcttgcagctgcaccagcttactgctccaccattcaacatatacacgtatccggtttgtgacttagagtcatccagatctgtgtcgaagctagcgtcgacgtaaccctttacgacgagctcttcgtcacctccataaacgagaaacatgtcctttgtccttttcaggtactttaggatattcttga

SEQ ID NO: 11 - DNA, 100249 bp, Artificial Sequence
  Scaffold 1935984
  misc_feature (6)..(5496): n is a, c, g, or t
  misc_feature (5502)..(5521): n is a, c, g, or t
  misc_feature (5532)..(6072): n is a, c, g, or t
  misc_feature (6714)..(6926): n is a, c, g, or t
  misc_feature (7757)..(9914): n is a, c, g, or t
  misc_feature (9931)..(28824): n is a, c, g, or t
  misc_feature (29706)..(29893): n is a, c, g, or t
  misc_feature (29901)..(30928): n is a, c, g, or t
  misc_feature (31039)..(31443): n is a, c, g, or t
  misc_feature (31824)..(31877): n is a, c, g, or t
  misc_feature (33242)..(33394): n is a, c, g, or t
  misc_feature (33554)..(33584): n is a, c, g, or t
  misc_feature (33653)..(33748): n is a, c, g, or t
  misc_feature (34057)..(35839): n is a, c, g, or t
  misc_feature (35934)..(36120): n is a, c, g, or t
  misc_feature (36364)..(36889): n is a, c, g, or t
  misc_feature (37064)..(42169): n is a, c, g, or t
  misc_feature (42189)..(52441): n is a, c, g, or t
  misc_feature (53046)..(56193): n is a, c, g, or t
  misc_feature (56202)..(56342): n is a, c, g, or t
  misc_feature (56344)..(56705): n is a, c, g, or t
  misc_feature (59541)..(60042): n is a, c, g, or t
  misc_feature (60052)..(62749): n is a, c, g, or t
  misc_feature (62789)..(63282): n is a, c, g, or t
  misc_feature (63292)..(64904): n is a, c, g, or t
  misc_feature (67404)..(67495): n is a, c, g, or t
  misc_feature (67562)..(68324): n is a, c, g, or t
  misc_feature (68336)..(69419): n is a, c, g, or t
  misc_feature (69795)..(76648): n is a, c, g, or t
  misc_feature (76654)..(79297): n is a, c, g, or t
  misc_feature (79383)..(79460): n is a, c, g, or t
  misc_feature (79463)..(82840): n is a, c, g, or t
  misc_feature (83678)..(83796): n is a, c, g, or t
  misc_feature (83923)..(84478): n is a, c, g, or t
  misc_feature (84640)..(84763): n is a, c, g, or t
  misc_feature (85725)..(85980): n is a, c, g, or t
  misc_feature (87198)..(87231): n is a, c, g, or t
  misc_feature (87351)..(88137): n is a, c, g, or t
  misc_feature (88315)..(88787): n is a, c, g, or t
  misc_feature (88858)..(89056): n is a, c, g, or t
  misc_feature (89508)..(89548): n is a, c, g, or t
  misc_feature (90806)..(90838): n is a, c, g, or t
  misc_feature (90898)..(91154): n is a, c, g, or t
  misc_feature (91735)..(92684): n is a, c, g, or t
  misc_feature (92860)..(92987): n is a, c, g, or t
  misc_feature (93110)..(96531): n is a, c, g, or t
  misc_feature (96534)..(96583): n is a, c, g, or t
  misc_feature (96607)..(98933): n is a, c, g, or t
  misc_feature (98943)..(100249): n is a, c, g, or t
tagttnnnnnnnnnnnnnnnnnnnnnnnnnnnnnnnnnnnnnnnnnnnnnnnnnnnnnnnnnnnnnnnnnnnnnnnnnnnnnnnnnnnnnnnnnnnnnnnnnnnnnnnnnnnnnnnnnnnnnnnnnnnnnnnnnnnnnnnnnnnnnnnnnnnnnnnnnnnnnnnnnnnnnnnnnnnnnnnnnnnnnnnnnnnnnnnnnnnnnnnnnnnnnnnnnnnnnnnnnnnnnnnnnnnnnnnnnnnnnnnnnnnnnnnnnnnnnnnnnnnnnnnnnnnnnnnnnnnnnnnnnnnnnnnnnnnnnnnnnnnnnnnnnnnnnnnnnnnnnnnnnnnnnnnnnnnnnnnnnnnnnnnnnnnnnnnnnnnnnnnnnnnnnnnnnnnnnnnnnnnnnnnnnnnnnnnnnnnnnnnnnnnnnnnnnnnnnnnnnnnnnnnnnnnnnnnnnnnnnnnnnnnnnnnnnnnnnnnnnnnnnnnnnnnnnnnnnnnnnnnnnnnnnnnnnnnnnnnnnnnnnnnnnnnnnnnnnnnnnnnnnnnnnnnnnnnnnnnnnnnnnnnnnnnnnnnnnnnnnnnnnnnnnnnnnnnnnnnnnnnnnnnnnnnnnnnnnnnnnnnnnnnnnnnnnnnnnnnnnnnnnnnnnnnnnnnnnnnnnnnnnnnnnnnnnnnnnnnnnnnnnnnnnnnnnnnnnnnnnnnnnnnnnnnnnnnnnnnnnnnnnnnnnnnnnnnnnnnnnnnnnnnnnnnnnnnnnnnnnnnnnnnnnnnnnnnnnnnnnnnnnnnnnnnnnnnnnnnnnnnnnnnnnnnnnnnnnnnnnnnnnnnnnnnnnnnnnnnnnnnnnnnnnnnnnnnnnnnnnnnnnnnnnnnnnnnnnnnnnnnnnnnnnnnnnnnnnnnnnnnnnnnnnnnnnnnnnnnnnnnnnnnnnnnnnnnnnnnnnnnnnnnnnnnnnnnnnnnnnnnnnnnnnnnnnnnnnnnnnnnnnnnnnnnnnnnnnnnnnnnnnnnnnnnnnnnnnnnnnnnnnnnnnnnnnnnnnnnnnnnnnnnnnnnnnnnnnnnnnnnnnnnnnnnnnnnnnnnnnnnnnnnnnnnnnnnnnnnnnnnnnnnnnnnnnnnnnnnnnnnnnnnnnnnnnnnnnnnnnnnnnnnnnnnnnnnnnnnnnnnnnnnnnnnnnnnnnnnnnnnnnnnnnnnnnnnnnnnnnnnnnnnnnnnnnnnnnnnnnnnnnnnnnnnnnnnnnnnnnnnnnnnnnnnnnnnnnnnnnnnnnnnnnnnnnnnnnnnnnnnnnnnnnnnnnnnnnnnnnnnnnnnnnnnnnnnnnnnnnnnnnnnnnnnnnnnnnnnnnnnnnnnnnnnnnnnnnnnnnnnnnnnnnnnnnnnnnnnnnnnnnnnnnnnnnnnnnnnnnnnnnnnnnnnnnnnnnnnnnnnnnnnnnnnnnnnnnnnnnnnnnnnnnnnnnnnnnnnnnnnnnnnnnnnnnnnnnnnnnnnnnnnnnnnnnnnnnnnnnnnnnnnnnnnnnnnnnnnnnnnnnnnnnnnnnnnnnnnnnnnnnnnnnnnnnnnnnnnnnnnnnnnnnnnnnnnnnnnnnnnnnnnnnnnnnnnnnnnnnnnnnnnnnnnnnnnnnnnnnnnnnnnnnnnnnnnnnnnnnnnnnnnnnnnnnnnnnnnnnnnnnnnnnnnnnnnnnnnnnnnnnnnnnnnnnnnnnnnnnnnnnnnnnnnnnnnnnnnnnnnnnnnnnnnnnnnnnnnnnnnnnnnnnnnnnnnnnnnnnnnnnnnnnnnnnnnnnnnnnnnnnnnnnnnnnnnnnnnnnnnnnnnnnnnnnnnnnnnnnnnnnnnnnnnnnnnnnnnnnnnnnnnnnnnnnnnnnnnnnnnnnnnnnnnnnnnnnnnnnnnnnnnnnnnnnnnnnnnnnnnnnnnnnnnnnnnnnnnnnnnnnnnnnnnnnnnnnnnnnnnnnnnnnnnnnnnnnnnnnnnnnnnnnnnnnnnnnnnnnnnnnnnnnnnnnnnnnnnnnnnnnnnnnnnnnnnnnnnnnnnnnnnnnnnnnnnnnnnnnnnnnnnnnnnnnnnnnnnnnnnnnnnnnnnnnnnnnnnnnnnnnnnnnnnnnnnnnnnnnnnnnnnnnnnnnnnnnnnnnnnnnnnnnnnnnnnnnnnnnnnnnnnnnnnnnnnnnnnnnnnnnnnnnnnnnnnnnnnnnnnnnnnnnnnnnnnnnnnnnnnnnnnnnnnnnnnnnnnnnnnnnnnnnnnnnnnnnnnnnnnnnnnnnnnnnnnnnnnnnnnnnnnnnnnnnnnnnnnnnnnnnnnnnnnnnnnnnnnnnnnnnnnnnnnnnnnnnnnnnnnnnnnnnnnnnnnnnnnnnnnnnnnnnnnnnnnnnnnnnnnnnnnnnnnnnnnnnnnnnnnnnnnnnnnnnnnnnnnnnnnnnnnnnnnnnnnnnnnnnnnnnnnnnnnnnnnnnnnnnnnnnnnnnnnnnnnnnnnnnnnnnnnnnnnnnnnnnnnnnnnnnnnnnnnnnnnnnnnnnnnnnnnnnnnnnnnnnnnnnnnnnnnnnnnnnnnnnnnnnnnnnnnnnnnnnnnnnnnnnnnnnnnnnnnnnnnnnnnnnnnnnnnnnnnnnnnnnnnnnnnnnnnnnnnnnnnnnnnnnnnnnnnnnnnnnnnnnnnnnnnnnnnnnnnnnnnnnnnnnnnnnnnnnnnnnnnnnnnnnnnnnnnnnnnnnnnnnnnnnnnnnnnnnnnnnnnnnnnnnnnnnnnnnnnnnnnnnnnnnnnnnnnnnnnnnnnnnnnnnnnnnnnnnnnnnnnnnnnnnnnnnnnnnnnnnnnnnnnnnnnnnnnnnnnnnnnnnnnnnnnnnnnnnnnnnnnnnnnnnnnnnnnnnnnnnnnnnnnnnnnnnnnnnnnnnnnnnnnnnnnnnnnnnnnnnnnnnnnnnnnnnnnnnnnnnnnnnnnnnnnnnnnnnnnnnnnnnnnnnnnnnnnnnnnnnnnnnnnnnnnnnnnnnnnnnnnnnnnnnnnnnnnnnnnnnnnnnnnnnnnnnnnnnnnnnnnnnnnnnnnnnnnnnnnnnnnnnnnnnnnnnnnnnnnnnnnnnnnnnnnnnnnnnnnnnnnnnnnnnnnnnnnnnnnnnnnnnnnnnnnnnnnnnnnnnnnnnnnnnnnnnnnnnnnnnnnnnnnnnnnnnnnnnnnnnnnnnnnnnnnnnnnnnnnnnnnnnnnnnnnnnnnnnnnnnnnnnnnnnnnnnnnnnnnnnnnnnnnnnnnnnnnnnnnnnnnnnnnnnnnnnnnnnnnnnnnnnnnnnnnnnnnnnnnnnnnnnnnnnnnnnnnnnnnnnnnnnnnnnnnnnnnnnnnnnnnnnnnnnnnnnnnnnnnnnnnnnnnnnnnnnnnnnnnnnnnnnnnnnnnnnnnnnnnnnnnnnnnnnnnnnnnnnnnnnnnnnnnnnnnnnnnnnnnnnnnnnnnnnnnnnnnnnnnnnnnnnnnnnnnnnnnnnnnnnnnnnnnnnnnnnnnnnnnnnnnnnnnnnnnnnnnnnnnnnnnnnnnnnnnnnnnnnnnnnnnnnnnnnnnnnnnnnnnnnnnnnnnnnnnnnnnnnnnnnnnnnnnnnnnnnnnnnnnnnnnnnnnnnnnnnnnnnnnnnnnnnnnnnnnnnnnnnnnnnnnnnnnnnnnnnnnnnnnnnnnnnnnnnnnnnnnnnnnnnnnnnnnnnnnnnnnnnnnnnnnnnnnnnnnnnnnnnnnnnnnnnnnnnnnnnnnnnnnnnnnnnnnnnnnnnnnnnnnnnnnnnnnnnnnnnnnnnnnnnnnnnnnnnnnnnnnnnnnnnnnnnnnnnnnnnnnnnnnnnnnnnnnnnnnnnnnnnnnnnnnnnnnnnnnnnnnnnnnnnnnnnnnnnnnnnnnnnnnnnnnnnnnnnnnnnnnnnnnnnnnnnnnnnnnnnnnnnnnnnnnnnnnnnnnnnnnnnnnnnnnnnnnnnnnnnnnnnnnnnnnnnnnnnnnnnnnnnnnnnnnnnnnnnnnnnnnnnnnnnnnnnnnnnnnnnnnnnnnnnnnnnnnnnnnnnnnnnnnnnnnnnnnnnnnnnnnnnnnnnnnnnnnnnnnnnnnnnnnnnnnnnnnnnnnnnnnnnnnnnnnnnnnnnnnnnnnnnnnnnnnnnnnnnnnnnnnnnnnnnnnnnnnnnnnnnnnnnnnnnnnnnnnnnnnnnnnnnnnnnnnnnnnnnnnnnnnnnnnnnnnnnnnnnnnnnnnnnnnnnnnnnnnnnnnnnnnnnnnnnnnnnnnnnnnnnnnnnnnnnnnnnnnnnnnnnnnnnnnnnnnnnnnnnnnnnnnnnnnnnnnnnnnnnnnnnnnnnnnnnnnnnnnnnnnnnnnnnnnnnnnnnnnnnnnnnnnnnnnnnnnnnnnnnnnnnnnnnnnnnnnnnnnnnnnnnnnnnnnnnnnnnnnnnnnnnnnnnnnnnnnnnnnnnnnnnnnnnnnnnnnnnnnnnnnnnnnnnnnnnnnnnnnnnnnnnnnnnnnnnnnnnnnnnnnnnnnnnnnnnnnnnnnnnnnnnnnnnnnnnnnnnnnnnnnnnnnnnnnnnnnnnnnnnnnnnnnnnnnnnnnnnnnnnnnnnnnnnnnnnnnnnnnnnnnnnnnnnnnnnnnnnnnnnnnnnnnnnnnnnnnnnnnnnnnnnnnnnnnnnnnnnnnnnnnnnnnnnnnnnnnnnnnnnnnnnnnnnnnnnnnnnnnnnnnnnnnnnnnnnnnnnnnnnnnnnnnnnnnnnnnnnnnnnnnnnnnnnnnnnnnnnnnnnnnnnnnnnnnnnnnnnnnnnnnnnnnnnnnnnnnnnnnnnnnnnnnnnnnnnnnnnnnnnnnnnnnnnnnnnnnnnnnnnnnnnnnnnnnnnnnnnnnnnnnnnnnnnnnnnnnnnnnnnnnnnnnnnnnnnnnnnnnnnnnnnnnnnnnnnnnnnnnnnnnnnnnnnnnnnnnnnnnnnnnnnnnnnnnnnnnnnnnnnnnnnnnnnnnnnnnnnnnnnnnnnnnnnnnnnnnnnnnnnnnnnnnnnnnnnnnnnnnnnnnnnnnnnnnnnnnnnnnnnnnnnnnnnnnnnnnnnnnnnnnnnnnnnnnnnnnnnnnnnnnnnnnnnnnnnnnnnnnnnnnnnnnnnnnnnnnnnnnnnnnnnnnnnnnnnnnnnnnnnnnnnnnnnnnnnnnnnnnnnnnnnnnnnnnnnnnnnnnnnnnnnnnnnnnnnnnnnnnnnnnnnnnnnnnnnnnnnnnnnnnnnnnnnnnnnnnnnnnnnnnnnnnnnnnnnnnnnnnnnnnnnnnnnnnnnnnnnnnnnnnnnnnnnnnnnnnnnnnnnnnnnnnnnnnnnnnnnnnnnnnnnnnnnnnnnnnnnnnnnnnnnnnnnnnnnnnnnnnnnnnnnnnnnnnnnnnnnnnnnnnnnnnnnnnnnnnnnnnnnnnnnnnnnnnnnnnnnnnnnnnnnnnnnnnnnnnnnnnnnnnnnnnnnnnnnnnnnnnnnnnnnnnnnnnnnnnnnnnnnnnnnnnnnnnnnnnnnnnnnnnnnnnnnnnnnnnnnnnnnnnnnnnnnnnnnnnnnnnnnnnnnnnnnnnnnnnaggacnnnnnnnnnnnnnnnnnnnnacacgtatacnnnnnnnnnnnnnnnnnnnnnnnnnnnnnnnnnnnnnnnnnnnnnnnnnnnnnnnnnnnnnnnnnnnnnnnnnnnnnnnnnnnnnnnnnnnnnnnnnnnnnnnnnnnnnnnnnnnnnnnnnnnnnnnnnnnnnnnnnnnnnnnnnnnnnnnnnnnnnnnnnnnnnnnnnnnnnnnnnnnnnnnnnnnnnnnnnnnnnnnnnnnnnnnnnnnnnnnnnnnnnnnnnnnnnnnnnnnnnnnnnnnnnnnnnnnnnnnnnnnnnnnnnnnnnnnnnnnnnnnnnnnnnnnnnnnnnnnnnnnnnnnnnnnnnnnnnnnnnnnnnnnnnnnnnnnnnnnnnnnnnnnnnnnnnnnnnnnnnnnnnnnnnnnnnnnnnnnnnnnnnnnnnnnnnnnnnnnnnnnnnnnnnnnnnnnnnnnnnnnnnnnnnnnnnnnnnnnnnnnnnnnnnnnnnnnnnnnnnnnnnnnnnnnnnnnnnnnnnnnnnnnnnnnnnnnnnnnnnnnnnnnnnnnnnnnnnnnnnnnnnnnnnnnnnnnnnnnnnnnnnccgcactcgctgctaagtccatataagggtcctctgaaccccacagttggcccacctgagcatattttggatccgtaaaccttcggcgcagcagaaaaggcttgccagctacaatatctccggcctggcgcagcacttcctttatagcccgcattgcagagcgggcatccttggcttcggcggtggccttccgcaggtcttcttgccccgctaggcgctccttcccaagagcctcattgcggtcggtagcatcttttaacttcacggccatttcggccatctcttccctgctccggcagtgtgtgaccctttcggccgctaacccctcggccgccctcgaggccgccgcattactccttctggcctgctccttggcttgagcaagttcggcccgaaggctctccacggcagcggcactacctgcatttcacgcacatgttgtaaggaaatggcttcggctcccttaccaagtgaccgcgcagtaacacttaccttgcgactcatcaagtcgcctgttgatcagcgtgatgtccgcatccgcagcatcgagttgccgctttagttcagcaactccatcagtccggctggcccccggacgacccgccacctgcatcggcacgacgggaatttaaacctgcgatnnnnnnnnnnnnnnnnnnnnnnnnnnnnnnnnnnnnnnnnnnnnnnnnnnnnnnnnnnnnnnnnnnnnnnnnnnnnnnnnnnnnnnnnnnnnnnnnnnnnnnnnnnnnnnnnnnnnnnnnnnnnnnnnnnnnnnnnnnnnnnnnnnnnnnnnnnnnnnnnnnnnnnnnnnnnnnnnnnnnnnnnnnnnnnnnnnnnnnnnnnnnnnnnnnnnntgagatagacgccttctcaagcagatccttcagccgtacaccagttggcgccgaactatccggctttgccaaacccgggggctccctccgtgacgacacttcaggctcgtccgccctatccgacggcgccccggacggaggcgtctcgctctctatcatctccggacgaaggtcccccgaagacgagctcatctgcgaaggacggagatccgaactacaaggtaaaaactttagttatcctcagaagcacaaatagggatgtcccttattataaaactcctttctttctacttacggctcgttggagggctgactcattaagggagattgtgcggccggggcctccccggacgcaggaccctctggcgaagatttcttcccccgtttaggggcttttgcccccgggtcctcggaggcagtcctcttctccccttggggggagggattctcgatcccccctctttcaagagcctccttaggcgaggcagtagcttccttgttttccccttcgtcttcctctgaaggcgcaacctcaagcatccggaccagcacgggatccggcgcggtctcggggaggggggctggacaccgtatcaattttgcttccgctatccactcctgtgtagaaggaaattggtcataaggcgaatcatcgaaaggcaaacaaacggtatgtccggactcggaactacttacttgagtatccgggcgattgcagcttaggccagcatcctcggtcaattccggacgcacctcttgcgatccgaagaataatttgtacatctccaggggtgtcaagcccatgaagtgttgaagaatccgtggaccctnnnnnnnnnnnnnnnnnnnnnnnnnnnnnnnnnnnnnnnnnnnnnnnnnnnnnnnnnnnnnnnnnnnnnnnnnnnnnnnnnnnnnnnnnnnnnnnnnnnnnnnnnnnnnnnnnnnnnnnnnnnnnnnnnnnnnnnnnnnnnnnnnnnnnnnnnnnnnnnnnnnnnnnnnnnnnnnnnnnnnnnnnnnnnnnnnnnnnnnnnnnnnnnnnnnnnnnnnnnnnnnnnnnnnnnnnnnnnnnnnnnnnnnnnnnnnnnnnnnnnnnnnnnnnnnnnnnnnnnnnnnnnnnnnnnnnnnnnnnnnnnnnnnnnnnnnnnnnnnnnnnnnnnnnnnnnnnnnnnnnnnnnnnnnnnnnnnnnnnnnnnnnnnnnnnnnnnnnnnnnnnnnnnnnnnnnnnnnnnnnnnnnnnnnnnnnnnnnnnnnnnnnnnnnnnnnnnnnnnnnnnnnnnnnnnnnnnnnnnnnnnnnnnnnnnnnnnnnnnnnnnnnnnnnnnnnnnnnnnnnnnnnnnnnnnnnnnnnnnnnnnnnnnnnnnnnnnnnnnnnnnnnnnnnnnnnnnnnnnnnnnnnnnnnnnnnnnnnnnnnnnnnnnnnnnnnnnnnnnnnnnnnnnnnnnnnnnnnnnnnnnnnnnnnnnnnnnnnnnnnnnnnnnnnnnnnnnnnnnnnnnnnnnnnnnnnnnnnnnnnnnnnnnnnnnnnnnnnnnnnnnnnnnnnnnnnnnnnnnnnnnnnnnnnnnnnnnnnnnnnnnnnnnnnnnnnnnnnnnnnnnnnnnnnnnnnnnnnnnnnnnnnnnnnnnnnnnnnnnnnnnnnnnnnnnnnnnnnnnnnnnnnnnnnnnnnnnnnnnnnnnnnnnnnnnnnnnnnnnnnnnnnnnnnnnnnnnnnnnnnnnnnnnnnnnnnnnnnnnnnnnnnnnnnnnnnnnnnnnnnnnnnnnnnnnnnnnnnnnnnnnnnnnnnnnnnnnnnnnnnnnnnnnnnnnnnnnnnnnnnnnnnnnnnnnnnnnnnnnnnnnnnnnnnnnnnnnnnnnnnnnnnnnnnnnnnnnnnnnnnnnnnnnnnnnnnnnnnnnnnnnnnnnnnnnnnnnnnnnnnnnnnnnnnnnnnnnnnnnnnnnnnnnnnnnnnnnnnnnnnnnnnnnnnnnnnnnnnnnnnnnnnnnnnnnnnnnnnnnnnnnnnnnnnnnnnnnnnnnnnnnnnnnnnnnnnnnnnnnnnnnnnnnnnnnnnnnnnnnnnnnnnnnnnnnnnnnnnnnnnnnnnnnnnnnnnnnnnnnnnnnnnnnnnnnnnnnnnnnnnnnnnnnnnnnnnnnnnnnnnnnnnnnnnnnnnnnnnnnnnnnnnnnnnnnnnnnnnnnnnnnnnnnnnnnnnnnnnnnnnnnnnnnnnnnnnnnnnnnnnnnnnnnnnnnnnnnnnnnnnnnnnnnnnnnnnnnnnnnnnnnnnnnnnnnnnnnnnnnnnnnnnnnnnnnnnnnnnnnnnnnnnnnnnnnnnnnnnnnnnnnnnnnnnnnnnnnnnnnnnnnnnnnnnnnnnnnnnnnnnnnnnnnnnnnnnnnnnnnnnnnnnnnnnnnnnnnnnnnnnnnnnnnnnnnnnnnnnnnnnnnnnnnnnnnnnnnnnnnnnnnnnnnnnnnnnnnnnnnnnnnnnnnnnnnnnnnnnnnnnnnnnnnnnnnnnnnnnnnnnnnnnnnnnnnnnnnnnnnnnnnnnnnnnnnnnnnnnnnnnnnnnnnnnnnnnnnnnnnnnnnnnnnnnnnnnnnnnnnnnnnnnnnnnnnnnnnnnnnnnnnnnnnnnnnnnnnnnnnnnnnnnnnnnnnnnnnnnnnnnnnnnnnnnnnnnnnnnnnnnnnnnnnnnnnnnnnnnnnnnnnnnnnnnnnnnnnnnnnnnnnnnnnnnnnnnnnnnnnnnnnnnnnnnnnnnnnnnnnnnnnnnnnnnnnnnnnnnnnnnnnnnnnnnnnnnnnnnnnnnnnnnnnnnnnnnnnnnnnnnnnnnnnnnnnnnnnnnnnnnnnnnnnnnnnnnnnnnnnnnnnnnnnnnnnnnnnnnnnnnnnnnnnnnnnnnnnnnnnnnnnnnnnnnnnnnnnnnnnnnnnnnnnnnnnnnnnnnnnnnnnnnnnnnnnnnnnnnnnnnnnnnnnnnnnnnnnnnnnnnnnnnnnnnnnnnnnnnnnnnnnnnnnnnnnnnnnnnncggcgaagcaagcacannnnnnnnnnnnnnnnnnnnnnnnnnnnnnnnnnnnnnnnnnnnnnnnnnnnnnnnnnnnnnnnnnnnnnnnnnnnnnnnnnnnnnnnnnnnnnnnnnnnnnnnnnnnnnnnnnnnnnnnnnnnnnnnnnnnnnnnnnnnnnnnnnnnnnnnnnnnnnnnnnnnnnnnnnnnnnnnnnnnnnnnnnnnnnnnnnnnnnnnnnnnnnnnnnnnnnnnnnnnnnnnnnnnnnnnnnnnnnnnnnnnnnnnnnnnnnnnnnnnnnnnnnnnnnnnnnnnnnnnnnnnnnnnnnnnnnnnnnnnnnnnnnnnnnnnnnnnnnnnnnnnnnnnnnnnnnnnnnnnnnnnnnnnnnnnnnnnnnnnnnnnnnnnnnnnnnnnnnnnnnnnnnnnnnnnnnnnnnnnnnnnnnnnnnnnnnnnnnnnnnnnnnnnnnnnnnnnnnnnnnnnnnnnnnnnnnnnnnnnnnnnnnnnnnnnnnnnnnnnnnnnnnnnnnnnnnnnnnnnnnnnnnnnnnnnnnnnnnnnnnnnnnnnnnnnnnnnnnnnnnnnnnnnnnnnnnnnnnnnnnnnnnnnnnnnnnnnnnnnnnnnnnnnnnnnnnnnnnnnnnnnnnnnnnnnnnnnnnnnnnnnnnnnnnnnnnnnnnnnnnnnnnnnnnnnnnnnnnnnnnnnnnnnnnnnnnnnnnnnnnnnnnnnnnnnnnnnnnnnnnnnnnnnnnnnnnnnnnnnnnnnnnnnnnnnnnnnnnnnnnnnnnnnnnnnnnnnnnnnnnnnnnnnnnnnnnnnnnnnnnnnnnnnnnnnnnnnnnnnnnnnnnnnnnnnnnnnnnnnnnnnnnnnnnnnnnnnnnnnnnnnnnnnnnnnnnnnnnnnnnnnnnnnnnnnnnnnnnnnnnnnnnnnnnnnnnnnnnnnnnnnnnnnnnnnnnnnnnnnnnnnnnnnnnnnnnnnnnnnnnnnnnnnnnnnnnnnnnnnnnnnnnnnnnnnnnnnnnnnnnnnnnnnnnnnnnnnnnnnnnnnnnnnnnnnnnnnnnnnnnnnnnnnnnnnnnnnnnnnnnnnnnnnnnnnnnnnnnnnnnnnnnnnnnnnnnnnnnnnnnnnnnnnnnnnnnnnnnnnnnnnnnnnnnnnnnnnnnnnnnnnnnnnnnnnnnnnnnnnnnnnnnnnnnnnnnnnnnnnnnnnnnnnnnnnnnnnnnnnnnnnnnnnnnnnnnnnnnnnnnnnnnnnnnnnnnnnnnnnnnnnnnnnnnnnnnnnnnnnnnnnnnnnnnnnnnnnnnnnnnnnnnnnnnnnnnnnnnnnnnnnnnnnnnnnnnnnnnnnnnnnnnnnnnnnnnnnnnnnnnnnnnnnnnnnnnnnnnnnnnnnnnnnnnnnnnnnnnnnnnnnnnnnnnnnnnnnnnnnnnnnnnnnnnnnnnnnnnnnnnnnnnnnnnnnnnnnnnnnnnnnnnnnnnnnnnnnnnnnnnnnnnnnnnnnnnnnnnnnnnnnnnnnnnnnnnnnnnnnnnnnnnnnnnnnnnnnnnnnnnnnnnnnnnnnnnnnnnnnnnnnnnnnnnnnnnnnnnnnnnnnnnnnnnnnnnnnnnnnnnnnnnnnnnnnnnnnnnnnnnnnnnnnnnnnnnnnnnnnnnnnnnnnnnnnnnnnnnnnnnnnnnnnnnnnnnnnnnnnnnnnnnnnnnnnnnnnnnnnnnnnnnnnnnnnnnnnnnnnnnnnnnnnnnnnnnnnnnnnnnnnnnnnnnnnnnnnnnnnnnnnnnnnnnnnnnnnnnnnnnnnnnnnnnnnnnnnnnnnnnnnnnnnnnnnnnnnnnnnnnnnnnnnnnnnnnnnnnnnnnnnnnnnnnnnnnnnnnnnnnnnnnnnnnnnnnnnnnnnnnnnnnnnnnnnnnnnnnnnnnnnnnnnnnnnnnnnnnnnnnnnnnnnnnnnnnnnnnnnnnnnnnnnnnnnnnnnnnnnnnnnnnnnnnnnnnnnnnnnnnnnnnnnnnnnnnnnnnnnnnnnnnnnnnnnnnnnnnnnnnnnnnnnnnnnnnnnnnnnnnnnnnnnnnnnnnnnnnnnnnnnnnnnnnnnnnnnnnnnnnnnnnnnnnnnnnnnnnnnnnnnnnnnnnnnnnnnnnnnnnnnnnnnnnnnnnnnnnnnnnnnnnnnnnnnnnnnnnnnnnnnnnnnnnnnnnnnnnnnnnnnnnnnnnnnnnnnnnnnnnnnnnnnnnnnnnnnnnnnnnnnnnnnnnnnnnnnnnnnnnnnnnnnnnnnnnnnnnnnnnnnnnnnnnnnnnnnnnnnnnnnnnnnnnnnnnnnnnnnnnnnnnnnnnnnnnnnnnnnnnnnnnnnnnnnnnnnnnnnnnnnnnnnnnnnnnnnnnnnnnnnnnnnnnnnnnnnnnnnnnnnnnnnnnnnnnnnnnnnnnnnnnnnnnnnnnnnnnnnnnnnnnnnnnnnnnnnnnnnnnnnnnnnnnnnnnnnnnnnnnnnnnnnnnnnnnnnnnnnnnnnnnnnnnnnnnnnnnnnnnnnnnnnnnnnnnnnnnnnnnnnnnnnnnnnnnnnnnnnnnnnnnnnnnnnnnnnnnnnnnnnnnnnnnnnnnnnnnnnnnnnnnnnnnnnnnnnnnnnnnnnnnnnnnnnnnnnnnnnnnnnnnnnnnnnnnnnnnnnnnnnnnnnnnnnnnnnnnnnnnnnnnnnnnnnnnnnnnnnnnnnnnnnnnnnnnnnnnnnnnnnnnnnnnnnnnnnnnnnnnnnnnnnnnnnnnnnnnnnnnnnnnnnnnnnnnnnnnnnnnnnnnnnnnnnnnnnnnnnnnnnnnnnnnnnnnnnnnnnnnnnnnnnnnnnnnnnnnnnnnnnnnnnnnnnnnnnnnnnnnnnnnnnnnnnnnnnnnnnnnnnnnnnnnnnnnnnnnnnnnnnnnnnnnnnnnnnnnnnnnnnnnnnnnnnnnnnnnnnnnnnnnnnnnnnnnnnnnnnnnnnnnnnnnnnnnnnnnnnnnnnnnnnnnnnnnnnnnnnnnnnnnnnnnnnnnnnnnnnnnnnnnnnnnnnnnnnnnnnnnnnnnnnnnnnnnnnnnnnnnnnnnnnnnnnnnnnnnnnnnnnnnnnnnnnnnnnnnnnnnnnnnnnnnnnnnnnnnnnnnnnnnnnnnnnnnnnnnnnnnnnnnnnnnnnnnnnnnnnnnnnnnnnnnnnnnnnnnnnnnnnnnnnnnnnnnnnnnnnnnnnnnnnnnnnnnnnnnnnnnnnnnnnnnnnnnnnnnnnnnnnnnnnnnnnnnnnnnnnnnnnnnnnnnnnnnnnnnnnnnnnnnnnnnnnnnnnnnnnnnnnnnnnnnnnnnnnnnnnnnnnnnnnnnnnnnnnnnnnnnnnnnnnnnnnnnnnnnnnnnnnnnnnnnnnnnnnnnnnnnnnnnnnnnnnnnnnnnnnnnnnnnnnnnnnnnnnnnnnnnnnnnnnnnnnnnnnnnnnnnnnnnnnnnnnnnnnnnnnnnnnnnnnnnnnnnnnnnnnnnnnnnnnnnnnnnnnnnnnnnnnnnnnnnnnnnnnnnnnnnnnnnnnnnnnnnnnnnnnnnnnnnnnnnnnnnnnnnnnnnnnnnnnnnnnnnnnnnnnnnnnnnnnnnnnnnnnnnnnnnnnnnnnnnnnnnnnnnnnnnnnnnnnnnnnnnnnnnnnnnnnnnnnnnnnnnnnnnnnnnnnnnnnnnnnnnnnnnnnnnnnnnnnnnnnnnnnnnnnnnnnnnnnnnnnnnnnnnnnnnnnnnnnnnnnnnnnnnnnnnnnnnnnnnnnnnnnnnnnnnnnnnnnnnnnnnnnnnnnnnnnnnnnnnnnnnnnnnnnnnnnnnnnnnnnnnnnnnnnnnnnnnnnnnnnnnnnnnnnnnnnnnnnnnnnnnnnnnnnnnnnnnnnnnnnnnnnnnnnnnnnnnnnnnnnnnnnnnnnnnnnnnnnnnnnnnnnnnnnnnnnnnnnnnnnnnnnnnnnnnnnnnnnnnnnnnnnnnnnnnnnnnnnnnnnnnnnnnnnnnnnnnnnnnnnnnnnnnnnnnnnnnnnnnnnnnnnnnnnnnnnnnnnnnnnnnnnnnnnnnnnnnnnnnnnnnnnnnnnnnnnnnnnnnnnnnnnnnnnnnnnnnnnnnnnnnnnnnnnnnnnnnnnnnnnnnnnnnnnnnnnnnnnnnnnnnnnnnnnnnnnnnnnnnnnnnnnnnnnnnnnnnnnnnnnnnnnnnnnnnnnnnnnnnnnnnnnnnnnnnnnnnnnnnnnnnnnnnnnnnnnnnnnnnnnnnnnnnnnnnnnnnnnnnnnnnnnnnnnnnnnnnnnnnnnnnnnnnnnnnnnnnnnnnnnnnnnnnnnnnnnnnnnnnnnnnnnnnnnnnnnnnnnnnnnnnnnnnnnnnnnnnnnnnnnnnnnnnnnnnnnnnnnnnnnnnnnnnnnnnnnnnnnnnnnnnnnnnnnnnnnnnnnnnnnnnnnnnnnnnnnnnnnnnnnnnnnnnnnnnnnnnnnnnnnnnnnnnnnnnnnnnnnnnnnnnnnnnnnnnnnnnnnnnnnnnnnnnnnnnnnnnnnnnnnnnnnnnnnnnnnnnnnnnnnnnnnnnnnnnnnnnnnnnnnnnnnnnnnnnnnnnnnnnnnnnnnnnnnnnnnnnnnnnnnnnnnnnnnnnnnnnnnnnnnnnnnnnnnnnnnnnnnnnnnnnnnnnnnnnnnnnnnnnnnnnnnnnnnnnnnnnnnnnnnnnnnnnnnnnnnnnnnnnnnnnnnnnnnnnnnnnnnnnnnnnnnnnnnnnnnnnnnnnnnnnnnnnnnnnnnnnnnnnnnnnnnnnnnnnnnnnnnnnnnnnnnnnnnnnnnnnnnnnnnnnnnnnnnnnnnnnnnnnnnnnnnnnnnnnnnnnnnnnnnnnnnnnnnnnnnnnnnnnnnnnnnnnnnnnnnnnnnnnnnnnnnnnnnnnnnnnnnnnnnnnnnnnnnnnnnnnnnnnnnnnnnnnnnnnnnnnnnnnnnnnnnnnnnnnnnnnnnnnnnnnnnnnnnnnnnnnnnnnnnnnnnnnnnnnnnnnnnnnnnnnnnnnnnnnnnnnnnnnnnnnnnnnnnnnnnnnnnnnnnnnnnnnnnnnnnnnnnnnnnnnnnnnnnnnnnnnnnnnnnnnnnnnnnnnnnnnnnnnnnnnnnnnnnnnnnnnnnnnnnnnnnnnnnnnnnnnnnnnnnnnnnnnnnnnnnnnnnnnnnnnnnnnnnnnnnnnnnnnnnnnnnnnnnnnnnnnnnnnnnnnnnnnnnnnnnnnnnnnnnnnnnnnnnnnnnnnnnnnnnnnnnnnnnnnnnnnnnnnnnnnnnnnnnnnnnnnnnnnnnnnnnnnnnnnnnnnnnnnnnnnnnnnnnnnnnnnnnnnnnnnnnnnnnnnnnnnnnnnnnnnnnnnnnnnnnnnnnnnnnnnnnnnnnnnnnnnnnnnnnnnnnnnnnnnnnnnnnnnnnnnnnnnnnnnnnnnnnnnnnnnnnnnnnnnnnnnnnnnnnnnnnnnnnnnnnnnnnnnnnnnnnnnnnnnnnnnnnnnnnnnnnnnnnnnnnnnnnnnnnnnnnnnnnnnnnnnnnnnnnnnnnnnnnnnnnnnnnnnnnnnnnnnnnnnnnnnnnnnnnnnnnnnnnnnnnnnnnnnnnnnnnnnnnnnnnnnnnnnnnnnnnnnnnnnnnnnnnnnnnnnnnnnnnnnnnnnnnnnnnnnnnnnnnnnnnnnnnnnnnnnnnnnnnnnnnnnnnnnnnnnnnnnnnnnnnnnnnnnnnnnnnnnnnnnnnnnnnnnnnnnnnnnnnnnnnnnnnnnnnnnnnnnnnnnnnnnnnnnnnnnnnnnnnnnnnnnnnnnnnnnnnnnnnnnnnnnnnnnnnnnnnnnnnnnnnnnnnnnnnnnnnnnnnnnnnnnnnnnnnnnnnnnnnnnnnnnnnnnnnnnnnnnnnnnnnnnnnnnnnnnnnnnnnnnnnnnnnnnnnnnnnnnnnnnnnnnnnnnnnnnnnnnnnnnnnnnnnnnnnnnnnnnnnnnnnnnnnnnnnnnnnnnnnnnnnnnnnnnnnnnnnnnnnnnnnnnnnnnnnnnnnnnnnnnnnnnnnnnnnnnnnnnnnnnnnnnnnnnnnnnnnnnnnnnnnnnnnnnnnnnnnnnnnnnnnnnnnnnnnnnnnnnnnnnnnnnnnnnnnnnnnnnnnnnnnnnnnnnnnnnnnnnnnnnnnnnnnnnnnnnnnnnnnnnnnnnnnnnnnnnnnnnnnnnnnnnnnnnnnnnnnnnnnnnnnnnnnnnnnnnnnnnnnnnnnnnnnnnnnnnnnnnnnnnnnnnnnnnnnnnnnnnnnnnnnnnnnnnnnnnnnnnnnnnnnnnnnnnnnnnnnnnnnnnnnnnnnnnnnnnnnnnnnnnnnnnnnnnnnnnnnnnnnnnnnnnnnnnnnnnnnnnnnnnnnnnnnnnnnnnnnnnnnnnnnnnnnnnnnnnnnnnnnnnnnnnnnnnnnnnnnnnnnnnnnnnnnnnnnnnnnnnnnnnnnnnnnnnnnnnnnnnnnnnnnnnnnnnnnnnnnnnnnnnnnnnnnnnnnnnnnnnnnnnnnnnnnnnnnnnnnnnnnnnnnnnnnnnnnnnnnnnnnnnnnnnnnnnnnnnnnnnnnnnnnnnnnnnnnnnnnnnnnnnnnnnnnnnnnnnnnnnnnnnnnnnnnnnnnnnnnnnnnnnnnnnnnnnnnnnnnnnnnnnnnnnnnnnnnnnnnnnnnnnnnnnnnnnnnnnnnnnnnnnnnnnnnnnnnnnnnnnnnnnnnnnnnnnnnnnnnnnnnnnnnnnnnnnnnnnnnnnnnnnnnnnnnnnnnnnnnnnnnnnnnnnnnnnnnnnnnnnnnnnnnnnnnnnnnnnnnnnnnnnnnnnnnnnnnnnnnnnnnnnnnnnnnnnnnnnnnnnnnnnnnnnnnnnnnnnnnnnnnnnnnnnnnnnnnnnnnnnnnnnnnnnnnnnnnnnnnnnnnnnnnnnnnnnnnnnnnnnnnnnnnnnnnnnnnnnnnnnnnnnnnnnnnnnnnnnnnnnnnnnnnnnnnnnnnnnnnnnnnnnnnnnnnnnnnnnnnnnnnnnnnnnnnnnnnnnnnnnnnnnnnnnnnnnnnnnnnnnnnnnnnnnnnnnnnnnnnnnnnnnnnnnnnnnnnnnnnnnnnnnnnnnnnnnnnnnnnnnnnnnnnnnnnnnnnnnnnnnnnnnnnnnnnnnnnnnnnnnnnnnnnnnnnnnnnnnnnnnnnnnnnnnnnnnnnnnnnnnnnnnnnnnnnnnnnnnnnnnnnnnnnnnnnnnnnnnnnnnnnnnnnnnnnnnnnnnnnnnnnnnnnnnnnnnnnnnnnnnnnnnnnnnnnnnnnnnnnnnnnnnnnnnnnnnnnnnnnnnnnnnnnnnnnnnnnnnnnnnnnnnnnnnnnnnnnnnnnnnnnnnnnnnnnnnnnnnnnnnnnnnnnnnnnnnnnnnnnnnnnnnnnnnnnnnnnnnnnnnnnnnnnnnnnnnnnnnnnnnnnnnnnnnnnnnnnnnnnnnnnnnnnnnnnnnnnnnnnnnnnnnnnnnnnnnnnnnnnnnnnnnnnnnnnnnnnnnnnnnnnnnnnnnnnnnnnnnnnnnnnnnnnnnnnnnnnnnnnnnnnnnnnnnnnnnnnnnnnnnnnnnnnnnnnnnnnnnnnnnnnnnnnnnnnnnnnnnnnnnnnnnnnnnnnnnnnnnnnnnnnnnnnnnnnnnnnnnnnnnnnnnnnnnnnnnnnnnnnnnnnnnnnnnnnnnnnnnnnnnnnnnnnnnnnnnnnnnnnnnnnnnnnnnnnnnnnnnnnnnnnnnnnnnnnnnnnnnnnnnnnnnnnnnnnnnnnnnnnnnnnnnnnnnnnnnnnnnnnnnnnnnnnnnnnnnnnnnnnnnnnnnnnnnnnnnnnnnnnnnnnnnnnnnnnnnnnnnnnnnnnnnnnnnnnnnnnnnnnnnnnnnnnnnnnnnnnnnnnnnnnnnnnnnnnnnnnnnnnnnnnnnnnnnnnnnnnnnnnnnnnnnnnnnnnnnnnnnnnnnnnnnnnnnnnnnnnnnnnnnnnnnnnnnnnnnnnnnnnnnnnnnnnnnnnnnnnnnnnnnnnnnnnnnnnnnnnnnnnnnnnnnnnnnnnnnnnnnnnnnnnnnnnnnnnnnnnnnnnnnnnnnnnnnnnnnnnnnnnnnnnnnnnnnnnnnnnnnnnnnnnnnnnnnnnnnnnnnnnnnnnnnnnnnnnnnnnnnnnnnnnnnnnnnnnnnnnnnnnnnnnnnnnnnnnnnnnnnnnnnnnnnnnnnnnnnnnnnnnnnnnnnnnnnnnnnnnnnnnnnnnnnnnnnnnnnnnnnnnnnnnnnnnnnnnnnnnnnnnnnnnnnnnnnnnnnnnnnnnnnnnnnnnnnnnnnnnnnnnnnnnnnnnnnnnnnnnnnnnnnnnnnnnnnnnnnnnnnnnnnnnnnnnnnnnnnnnnnnnnnnnnnnnnnnnnnnnnnnnnnnnnnnnnnnnnnnnnnnnnnnnnnnnnnnnnnnnnnnnnnnnnnnnnnnnnnnnnnnnnnnnnnnnnnnnnnnnnnnnnnnnnnnnnnnnnnnnnnnnnnnnnnnnnnnnnnnnnnnnnnnnnnnnnnnnnnnnnnnnnnnnnnnnnnnnnnnnnnnnnnnnnnnnnnnnnnnnnnnnnnnnnnnnnnnnnnnnnnnnnnnnnnnnnnnnnnnnnnnnnnnnnnnnnnnnnnnnnnnnnnnnnnnnnnnnnnnnnnnnnnnnnnnnnnnnnnnnnnnnnnnnnnnnnnnnnnnnnnnnnnnnnnnnnnnnnnnnnnnnnnnnnnnnnnnnnnnnnnnnnnnnnnnnnnnnnnnnnnnnnnnnnnnnnnnnnnnnnnnnnnnnnnnnnnnnnnnnnnnnnnnnnnnnnnnnnnnnnnnnnnnnnnnnnnnnnnnnnnnnnnnnnnnnnnnnnnnnnnnnnnnnnnnnnnnnnnnnnnnnnnnnnnnnnnnnnnnnnnnnnnnnnnnnnnnnnnnnnnnnnnnnnnnnnnnnnnnnnnnnnnnnnnnnnnnnnnnnnnnnnnnnnnnnnnnnnnnnnnnnnnnnnnnnnnnnnnnnnnnnnnnnnnnnnnnnnnnnnnnnnnnnnnnnnnnnnnnnnnnnnnnnnnnnnnnnnnnnnnnnnnnnnnnnnnnnnnnnnnnnnnnnnnnnnnnnnnnnnnnnnnnnnnnnnnnnnnnnnnnnnnnnnnnnnnnnnnnnnnnnnnnnnnnnnnnnnnnnnnnnnnnnnnnnnnnnnnnnnnnnnnnnnnnnnnnnnnnnnnnnnnnnnnnnnnnnnnnnnnnnnnnnnnnnnnnnnnnnnnnnnnnnnnnnnnnnnnnnnnnnnnnnnnnnnnnnnnnnnnnnnnnnnnnnnnnnnnnnnnnnnnnnnnnnnnnnnnnnnnnnnnnnnnnnnnnnnnnnnnnnnnnnnnnnnnnnnnnnnnnnnnnnnnnnnnnnnnnnnnnnnnnnnnnnnnnnnnnnnnnnnnnnnnnnnnnnnnnnnnnnnnnnnnnnnnnnnnnnnnnnnnnnnnnnnnnnnnnnnnnnnnnnnnnnnnnnnnnnnnnnnnnnnnnnnnnnnnnnnnnnnnnnnnnnnnnnnnnnnnnnnnnnnnnnnnnnnnnnnnnnnnnnnnnnnnnnnnnnnnnnnnnnnnnnnnnnnnnnnnnnnnnnnnnnnnnnnnnnnnnnnnnnnnnnnnnnnnnnnnnnnnnnnnnnnnnnnnnnnnnnnnnnnnnnnnnnnnnnnnnnnnnnnnnnnnnnnnnnnnnnnnnnnnnnnnnnnnnnnnnnnnnnnnnnnnnnnnnnnnnnnnnnnnnnnnnnnnnnnnnnnnnnnnnnnnnnnnnnnnnnnnnnnnnnnnnnnnnnnnnnnnnnnnnnnnnnnnnnnnnnnnnnnnnnnnnnnnnnnnnnnnnnnnnnnnnnnnnnnnnnnnnnnnnnnnnnnnnnnnnnnnnnnnnnnnnnnnnnnnnnnnnnnnnnnnnnnnnnnnnnnnnnnnnnnnnnnnnnnnnnnnnnnnnnnnnnnnnnnnnnnnnnnnnnnnnnnnnnnnnnnnnnnnnnnnnnnnnnnnnnnnnnnnnnnnnnnnnnnnnnnnnnnnnnnnnnnnnnnnnnnnnnnnnnnnnnnnnnnnnnnnnnnnnnnnnnnnnnnnnnnnnnnnnnnnnnnnnnnnnnnnnnnnnnnnnnnnnnnnnnnnnnnnnnnnnnnnnnnnnnnnnnnnnnnnnnnnnnnnnnnnnnnnnnnnnnnnnnnnnnnnnnnnnnnnnnnnnnnnnnnnnnnnnnnnnnnnnnnnnnnnnnnnnnnnnnnnnnnnnnnnnnnnnnnnnnnnnnnnnnnnnnnnnnnnnnnnnnnnnnnnnnnnnnnnnnnnnnnnnnnnnnnnnnnnnnnnnnnnnnnnnnnnnnnnnnnnnnnnnnnnnnnnnnnnnnnnnnnnnnnnnnnnnnnnnnnnnnnnnnnnnnnnnnnnnnnnnnnnnnnnnnnnnnnnnnnnnnnnnnnnnnnnnnnnnnnnnnnnnnnnnnnnnnnnnnnnnnnnnnnnnnnnnnnnnnnnnnnnnnnnnnnnnnnnnnnnnnnnnnnnnnnnnnnnnnnnnnnnnnnnnnnnnnnnnnnnnnnnnnnnnnnnnnnnnnnnnnnnnnnnnnnnnnnnnnnnnnnnnnnnnnnnnnnnnnnnnnnnnnnnnnnnnnnnnnnnnnnnnnnnnnnnnnnnnnnnnnnnnnnnnnnnnnnnnnnnnnnnnnnnnnnnnnnnnnnnnnnnnnnnnnnnnnnnnnnnnnnnnnnnnnnnnnnnnnnnnnnnnnnnnnnnnnnnnnnnnnnnnnnnnnnnnnnnnnnnnnnnnnnnnnnnnnnnnnnnnnnnnnnnnnnnnnnnnnnnnnnnnnnnnnnnnnnnnnnnnnnnnnnnnnnnnnnnnnnnnnnnnnnnnnnnnnnnnnnnnnnnnnnnnnnnnnnnnnnnnnnnnnnnnnnnnnnnnnnnnnnnnnnnnnnnnnnnnnnnnnnnnnnnnnnnnnnnnnnnnnnnnnnnnnnnnnnnnnnnnnnnnnnnnnnnnnnnnnnnnnnnnnnnnnnnnnnnnnnnnnnnnnnnnnnnnnnnnnnnnnnnnnnnnnnnnnnnnnnnnnnnnnnnnnnnnnnnnnnnnnnnnnnnnnnnnnnnnnnnnnnnnnnnnnnnnnnnnnnnnnnnnnnnnnnnnnnnnnnnnnnnnnnnnnnnnnnnnnnnnnnnnnnnnnnnnnnnnnnnnnnnnnnnnnnnnnnnnnnnnnnnnnnnnnnnnnnnnnnnnnnnnnnnnnnnnnnnnnnnnnnnnnnnnnnnnnnnnnnnnnnnnnnnnnnnnnnnnnnnnnnnnnnnnnnnnnnnnnnnnnnnnnnnnnnnnnnnnnnnnnnnnnnnnnnnnnnnnnnnnnnnnnnnnnnnnnnnnnnnnnnnnnnnnnnnnnnnnnnnnnnnnnnnnnnnnnnnnnnnnnnnnnnnnnnnnnnnnnnnnnnnnnnnnnnnnnnnnnnnnnnnnnnnnnnnnnnnnnnnnnnnnnnnnnnnnnnnnnnnnnnnnnnnnnnnnnnnnnnnnnnnnnnnnnnnnnnnnnnnnnnnnnnnnnnnnnnnnnnnnnnnnnnnnnnnnnnnnnnnnnnnnnnnnnnnnnnnnnnnnnnnnnnnnnnnnnnnnnnnnnnnnnnnnnnnnnnnnnnnnnnnnnnnnnnnnnnnnnnnnnnnnnnnnnnnnnnnnnnnnnnnnnnnnnnnnnnnnnnnnnnnnnnnnnnnnnnnnnnnnnnnnnnnnnnnnnnnnnnnnnnnnnnnnnnnnnnnnnnnnnnnnnnnnnnnnnnnnnnnnnnnnnnnnnnnnnnnnnnnnnnnnnnnnnnnnnnnnnnnnnnnnnnnnnnnnnnnnnnnnnnnnnnnnnnnnnnnnnnnnnnnnnnnnnnnnnnnnnnnnnnnnnnnnnnnnnnnnnnnnnnnnnnnnnnnnnnnnnnnnnnnnnnnnnnnnnnnnnnnnnnnnnnnnnnnnnnnnnnnnnnnnnnnnnnnnnnnnnnnnnnnnnnnnnnnnnnnnnnnnnnnnnnnnnnnnnnnnnnnnnnnnnnnnnnnnnnnnnnnnnnnnnnnnnnnnnnnnnnnnnnnnnnnnnnnnnnnnnnnnnnnnnnnnnnnnnnnnnnnnnnnnnnnnnnnnnnnnnnnnnnnnnnnnnnnnnnnnnnnnnnnnnnnnnnnnnnnnnnnnnnnnnnnnnnnnnnnnnnnnnnnnnnnnnnnnnnnnnnnnnnnnnnnnnnnnnnnnnnnnnnnnnnnnnnnnnnnnnnnnnnnnnnnnnnnnnnnnnnnnnnnnnnnnnnnnnnnnnnnnnnnnnnnnnnnnnnnnnnnnnnnnnnnnnnnnnnnnnnnnnnnnnnnnnnnnnnnnnnnnnnnnnnnnnnnnnnnnnnnnnnnnnnnnnnnnnnnnnnnnnnnnnnnnnnnnnnnnnnnnnnnnnnnnnnnnnnnnnnnnnnnnnnnnnnnnnnnnnnnnnnnnnnnnnnnnnnnnnnnnnnnnnnnnnnnnnnnnnnnnnnnnnnnnnnnnnnnnnnnnnnnnnnnnnnnnnnnnnnnnnnnnnnnnnnnnnnnnnnnnnnnnnnnnnnnnnnnnnnnnnnnnnnnnnnnnnnnnnnnnnnnnnnnnnnnnnnnnnnnnnnnnnnnnnnnnnnnnnnnnnnnnnnnnnnnnnnnnnnnnnnnnnnnnnnnnnnnnnnnnnnnnnnnnnnnnnnnnnnnnnnnnnnnnnnnnnnnnnnnnnnnnnnnnnnnnnnnnnnnnnnnnnnnnnnnnnnnnnnnnnnnnnnnnnnnnnnnnnnnnnnnnnnnnnnnnnnnnnnnnnnnnnnnnnnnnnnnnnnnnnnnnnnnnnnnnnnnnnnnnnnnnnnnnnnnnnnnnnnnnnnnnnnnnnnnnnnnnnnnnnnnnnnnnnnnnnnnnnnnnnnnnnnnnnnnnnnnnnnnnnnnnnnnnnnnnnnnnnnnnnnnnnnnnnnnnnnnnnnnnnnnnnnnnnnnnnnnnnnnnnnnnnnnnnnnnnnnnnnnnnnnnnnnnnnnnnnnnnnnnnnnnnnnnnnnnnnnnnnnnnnnnnnnnnnnnnnnnnnnnnnnnnnnnnnnnnnnnnnnnnnnnnnnnnnnnnnnnnnnnnnnnnnnnnnnnnnnnnnnnnnnnnnnnnnnnnnnnnnnnnnnnnnnnnnnnnnnnnnnnnnnnnnnnnnnnnnnnnnnnnnnnnnnnnnnnnnnnnnnnnnnnnnnnnnnnnnnnnnnnnnnnnnnnnnnnnnnnnnnnnnnnnnnnnnnnnnnnnnnnnnnnnnnnnnnnnnnnnnnnnnnnnnnnnnnnnnnnnnnnnnnnnnnnnnnnnnnnnnnnnnnnnnnnnnnnnnnnnnnnnnnnnnnnnnnnnnnnnnnnnnnnnnnnnnnnnnnnnnnnnnnnnnnnnnnnnnnnnnnnnnnnnnnnnnnnnnnnnnnnnnnnnnnnnnnnnnnnnnnnnnnnnnnnnnnnnnnnnnnnnnnnnnnnnnnnnnnnnnnnnnnnnnnnnnnnnnnnnnnnnnnnnnnnnnnnnnnnnnnnnnnnnnnnnnnnnnnnnnnnnnnnnnnnnnnnnnnnnnnnnnnnnnnnnnnnnnnnnnnnnnnnnnnnnnnnnnnnnnnnnnnnnnnnnnnnnnnnnnnnnnnnnnnnnnnnnnnnnnnnnnnnnnnnnnnnnnnnnnnnnnnnnnnnnnnnnnnnnnnnnnnnnnnnnnnnnnnnnnnnnnnnnnnnnnnnnnnnnnnnnnnnnnnnnnnnnnnnnnnnnnnnnnnnnnnnnnnnnnnnnnnnnnnnnnnnnnnnnnnnnnnnnnnnnnnnnnnnnnnnnnnnnnnnnnnnnnnnnnnnnnnnnnnnnnnnnnnnnnnnnnnnnnnnnnnnnnnnnnnnnnnnnnnnnnnnnnnnnnnnnnnnnnnnnnnnnnnnnnnnnnnnnnnnnnnnnnnnnnnnnnnnnnnnnnnnnnnnnnnnnnnnnnnnnnnnnnnnnnnnnnnnnnnnnnnnnnnnnnnnnnnnnnnnnnnnnnnnnnnnnnnnnnnnnnnnnnnnnnnnnnnnnnnnnnnnnnnnnnnnnnnnnnnnnnnnnnnnnnnnnnnnnnnnnnnnnnnnnnnnnnnnnnnnnnnnnnnnnnnnnnnnnnnnnnnnnnnnnnnnnnnnnnnnnnnnnnnnnnnnnnnnnnnnnnnnnnnnnnnnnnnnnnnnnnnnnnnnnnnnnnnnnnnnnnnnnnnnnnnnnnnnnnnnnnnnnnnnnnnnnnnnnnnnnnnnnnnnnnnnnnnnnnnnnnnnnnnnnnnnnnnnnnnnnnnnnnnnnnnnnnnnnnnnnnnnnnnnnnnnnnnnnnnnnnnnnnnnnnnnnnnnnnnnnnnnnnnnnnnnnnnnnnnnnnnnnnnnnnnnnnnnnnnnnnnnnnnnnnnnnnnnnnnnnnnnnnnnnnnnnnnnnnnnnnnnnnnnnnnnnnnnnnnnnnnnnnnnnnnnnnnnnnnnnnnnnnnnnnnnnnnnnnnnnnnnnnnnnnnnnnnnnnnnnnnnnnnnnnnnnnnnnnnnnnnnnnnnnnnnnnnnnnnnnnnnnnnnnnnnnnnnnnnnnnnnnnnnnnnnnnnnnnnnnnnnnnnnnnnnnnnnnnnnnnnnnnnnnnnnnnnnnnnnnnnnnnnnnnnnnnnnnnnnnnnnnnnnnnnnnnnnnnnnnnnnnnnnnnnnnnnnnnnnnnnnnnnnnnnnnnnnnnnnnnnnnnnnnnnnnnnnnnnnnnnnnnnnnnnnnnnnnnnnnnnnnnnnnnnnnnnnnnnnnnnnnnnnnnnnnnnnnnnnnnnnnnnnnnnnnnnnnnnnnnnnnnnnnnnnnnnnnnnnnnnnnnnnnnnnnnnnnnnnnnnnnnnnnnnnnnnnnnnnnnnnnnnnnnnnnnnnnnnnnnnnnnnnnnnnnnnnnnnnnnnnnnnnnnnnnnnnnnnnnnnnnnnnnnnnnnnnnnnnnnnnnnnnnnnnnnnnnnnnnnnnnnnnnnnnnnnnnnnnnnnnnnnnnnnnnnnnnnnnnnnnnnnnnnnnnnnnnnnnnnnnnnnnnnnnnnnnnnnnnnnnnnnnnnnnnnnnnnnnnnnnnnnnnnnnnnnnnnnnnnnnnnnnnnnnnnnnnnnnnnnnnnnnnnnnnnnnnnnnnnnnnnnnnnnnnnnnnnnnnnnnnnnnnnnnnnnnnnnnnnnnnnnnnnnnnnnnnnnnnnnnnnnnnnnnnnnnnnnnnnnnnnnnnnnnnnnnnnnnnnnnnnnnnnnnnnnnnnnnnnnnnnnnnnnnnnnnnnnnnnnnnnnnnnnnnnnnnnnnnnnnnnnnnnnnnnnnnnnnnnnnnnnnnnnnnnnnnnnnnnnnnnnnnnnnnnnnnnnnnnnnnnnnnnnnnnnnnnnnnnnnnnnnnnnnnnnnnnnnnnnnnnnnnnnnnnnnnnnnnnnnnnnnnnnnnnnnnnnnnnnnnnnnnnnnnnnnnnnnnnnnnnnnnnnnnnnnnnnnnnnnnnnnnnnnnnnnnnnnnnnnnnnnnnnnnnnnnnnnnnnnnnnnnnnnnnnnnnnnnnnnnnnnnnnnnnnnnnnnnnnnnnnnnnnnnnnnnnnnnnnnnnnnnnnnnnnnnnnnnnnnnnnnnnnnnnnnnnnnnnnnnnnnnnnnnnnnnnnnnnnnnnnnnnnnnnnnnnnnnnnnnnnnnnnnnnnnnnnnnnnnnnnnnnnnnnnnnnnnnnnnnnnnnnnnnnnnnnnnnnnnnnnnnnnnnnnnnnnnnnnnnnnnnnnnnnnnnnnnnnnnnnnnnnnnnnnnnnnnnnnnnnnnnnnnnnnnnnnnnnnnnnnnnnnnnnnnnnnnnnnnnnnnnnnnnnnnnnnnnnnnnnnnnnnnnnnnnnnnnnnnnnnnnnnnnnnnnnnnnnnnnnnnnnnnnnnnnnnnnnnnnnnnnnnnnnnnnnnnnnnnnnnnnnnnnnnnnnnnnnnnnnnnnnnnnnnnnnnnnnnnnnnnnnnnnnnnnnnnnnnnnnnnnnnnnnnnnnnnnnnnnnnnnnnnnnnnnnnnnnnnnnnnnnnnnnnnnnnnnnnnnnnnnnnnnnnnnnnnnnnnnnnnnnnnnnnnnnnnnnnnnnnnnnnnnnnnnnnnnnnnnnnnnnnnnnnnnnnnnnnnnnnnnnnnnnnnnnnnnnnnnnnnnnnnnnnnnnnnnnnnnnnnnnnnnnnnnnnnnnnnnnnnnnnnnnnnnnnnnnnnnnnnnnnnnnnnnnnnnnnnnnnnnnnnnnnnnnnnnnnnnnnnnnnnnnnnnnnnnnnnnnnnnnnnnnnnnnnnnnnnnnnnnnnnnnnnnnnnnnnnnnnnnnnnnnnnnnnnnnnnnnnnnnnnnnnnnnnnnnnnnnnnnnnnnnnnnnnnnnnnnnnnnnnnnnnnnnnnnnnnnnnnnnnnnnnnnnnnnnnnnnnnnnnnnnnnnnnnnnnnnnnnnnnnnnnnnnnnnnnnnnnnnnnnnnnnnnnnnnnnnnnnnnnnnnnnnnnnnnnnnnnnnnnnnnnnnnnnnnnnnnnnnnnnnnnnnnnnnnnnnnnnnnnnnnnnnnnnnnnnnnnnnnnnnnnnnnnnnnnnnnnnnnnnnnnnnnnnnnnnnnnnnnnnnnnnnnnnnnnnnnnnnnnnnnnnnnnnnnnnnnnnnnnnnnnnnnnnnnnnnnnnnnnnnnnnnnnnnnnnnnnnnnnnnnnnnnnnnnnnnnnnnnnnnnnnnnnnnnnnnnnnnnnnnnnnnnnnnnnnnnnnnnnnnnnnnnnnnnnnnnnnnnnnnnnnnnnnnnnnnnnnnnnnnnnnnnnnnnnnnnnnnnnnnnnnnnnnnnnnnnnnnnnnnnnnnnnnnnnnnnnnnnnnnnnnnnnnnnnnnnnnnnnnnnnnnnnnnnnnnnnnnnnnnnnnnnnnnnnnnnnnnnnnnnnnnnnnnnnnnnnnnnnnnnnnnnnnnnnnnnnnnnnnnnnnnnnnnnnnnnnnnnnnnnnnnnnnnnnnnnnnnnnnnnnnnnnnnnnnnnnnnnnnnnnnnnnnnnnnnnnnnnnnnnnnnnnnnnnnnnnnnnnnnnnnnnnnnnnnnnnnnnnnnnnnnnnnnnnnnnnnnnnnnnnnnnnnnnnnnnnnnnnnnnnnnnnnnnnnnnnnnnnnnnnnnnnnnnnnnnnnnnnnnnnnnnnnnnnnnnnnnnnnnnnnnnnnnnnnnnnnnnnnnnnnnnnnnnnnnnnnnnnnnnnnnnnnnnnnnnnnnnnnnnnnnnnnnnnnnnnnnnnnnnnnnnnnnnnnnnnnnnnnnnnnnnnnnnnnnnnnnnnnnnnnnnnnnnnnnnnnnnnnnnnnnnnnnnnnnnnnnnnnnnnnnnnnnnnnnnnnnnnnnnnnnnnnnnnnnnnnnnnnnnnnnnnnnnnnnnnnnnnnnnnnnnnnnnnnnnnnnnnnnnnnnnnnnnnnnnnnnnnnnnnnnnnnnnnnnnnnnnnnnnnnnnnnnnnnnnnnnnnnnnnnnnnnnnnnnnnnnnnnnnnnnnnnnnnnnnnnnnnnnnnnnnnnnnnnnnnnnnnnnnnnnnnnnnnnnnnnnnnnnnnnnnnnnnnnnnnnnnnnnnnnnnnnnnnnnnnnnnnnnnnnnnnnnnnnnnnnnnnnnnnnnnnnnnnnnnnnnnnnnnnnnnnnnnnnnnnnnnnnnnnnnnnnnnnnnnnnnnnnnnnnnnnnnnnnnnnnnnnnnnnnnnnnnnnnnnnnnnnnnnnnnnnnnnnnnnnnnnnnnnnnnnnnnnnnnnnnnnnnnnnnnnnnnnnnnnnnnnnnnnnnnnnnnnnnnnnnnnnnnnnnnnnnnnnnnnnnnnnnnnnnnnnnnnnnnnnnnnnnnnnnnnnnnnnnnnnnnnnnnnnnnnnnnnnnnnnnnnnnnnnnnnnnnnnnnnnnnnnnnnnnnnnnnnnnnnnnnnnnnnnnnnnnnnnnnnnnnnnnnnnnnnnnnnnnnnnnnnnnnnnnnnnnnnnnnnnnnnnnnnnnnnnnnnnnnnnnnnnnnnnnnnnnnnnnnnnnnnnnnnnnnnnnnnnnnnnnnnnnnnnnnnnnnnnnnnnnnnnnnnnnnnnnnnnnnnnnnnnnnnnnnnnnnnnnnnnnnnnnnnnnnnnnnnnnnnnnnnnnnnnnnnnnnnnnnnnnnnnnnnnnnnnnnnnnnnnnnnnnnnnnnnnnnnnnnnnnnnnnnnnnnnnnnnnnnnnnnnnnnnnnnnnnnnnnnnnnnnnnnnnnnnnnnnnnnnnnnnnnnnnnnnnnnnnnnnnnnnnnnnnnnnnnnnnnnnnnnnnnnnnnnnnnnnnnnnnnnnnnnnnnnnnnnnnnnnnnnnnnnnnnnnnnnnnnnnnnnnnnnnnnnnnnnnnnnnnnnnnnnnnnnnnnnnnnnnnnnnnnnnnnnnnnnnnnnnnnnnnnnnnnnnnnnnnnnnnnnnnnnnnnnnnnnnnnnnnnnnnnnnnnnnnnnnnnnnnnnnnnnnnnnnnnnnnnnnnnnnnnnnnnnnnnnnnnnnnnnnnnnnnnnnnnnnnnnnnnnnnnnnnnnnnnnnnnnnnnnnnnnnnnnnnnnnnnnnnnnnnnnnnnnnnnnnnnnnnnnnnnnnnnnnnnnnnnnnnnnnnnnnnnnnnnnnnnnnnnnnnnnnnnnnnnnnnnnnnnnnnnnnnnnnnnnnnnnnnnnnnnnnnnnnnnnnnnnnnnnnnnnnnnnnnnnnnnnnnnnnnnnnnnnnnnnnnnnnnnnnnnnnnnnnnnnnnnnnnnnnnnnnnnnnnnnnnnnnnnnnnnnnnnnnnnnnnnnnnnnnnnnnnnnnnnnnnnnnnnnnnnnnnnnnnnnnnnnnnnnnnnnnnnnnnnnnnnnnnnnnnnnnnnnnnnnnnnnnnnnnnnnnnnnnnnnnnnnnnnnnnnnnnnnnnnnnnnnnnnnnnnnnnnnnnnnnnnnnnnnnnnnnnnnnnnnnnnnnnnnnnnnnnnnnnnnnnnnnnnnnnnnnnnnnnnnnnnnnnnnnnnnnnnnnnnnnnnnnnnnnnnnnnnnnnnnnnnnnnnnnnnnnnnnnnnnnnnnnnnnnnnnnnnnnnnnnnnnnnnnnnnnnnnnnnnnnnnnnnnnnnnnnnnnnnnnnnnnnnnnnnnnnnnnnnnnnnnnnnnnnnnnnnnnnnnnnnnnnnnnnnnnnnagtgtagtggtcgttcggtggccaagggacctcaatgcaattgctcttatgtctggggtgctttgtactcatggtgaacctttataatagataagagtcatttaaaatattgggttacaaaaatccatgtaataattggaaaatcacttattaaaactacacacacgaacataagaaaacacattctcctctgtgtcgccactcccgtgaaaaattcgatggaagaggaacattcaaaaattcgatacatatgacctatcttttgaaatttgcaaatatcatacttttaacttatagagagtattcaaatgcaaatatggtattcccatgcaacaaatttgagtgaaaacgcgaatacttagatcataattgaattcatattttttagacatagaacggattttagcagtaatggaaatatcttccaaaaagaatgtaaaacaaaaacaaaagttgtcctctcatcttgtctaattttatacacggtatgatcatatccattctccacaaccactttgtgggtcgagggatgcaagttctgcataattaagcacctctcggtgatttgtcccttgtctgttgagttgataactgtagtaggagcaatacagtgctataaccctagacggctagggcaaaccatccaaactttacccgcgagcccatggattcgcctccactctgcctgccgctccggcagccggtggccggaaggggaatcccgatgcctccgctccggttactagtttaggttagaatttttaatcctcgcacatgcggtgcttgggtggatggcggtgctacttcttctagtttgtcttccgggccttgattctcctcgaattcatccttacggacgtagtcaacggagctcgggcttannnnnnnnnnnnnnnnnnnnnnnnnnnnnnnnnnnnnnnnnnnnnnnnnnnnnnnnnnnnnnnnnnnnnnnnnnnnnnnnnnnnnnnnnnnnnnnnnnnnnnnnnnnnnnnnnnnnnnnnnnnnnnnnnnnnnnnnnnnnnnnnnnnnnnnnnnnnnnnnnnnnnnnnnnnnnnnnnnnnnnnnnnnnggagtggnnnnnnnnnnnnnnnnnnnnnnnnnnnnnnnnnnnnnnnnnnnnnnnnnnnnnnnnnnnnnnnnnnnnnnnnnnnnnnnnnnnnnnnnnnnnnnnnnnnnnnnnnnnnnnnnnnnnnnnnnnnnnnnnnnnnnnnnnnnnnnnnnnnnnnnnnnnnnnnnnnnnnnnnnnnnnnnnnnnnnnnnnnnnnnnnnnnnnnnnnnnnnnnnnnnnnnnnnnnnnnnnnnnnnnnnnnnnnnnnnnnnnnnnnnnnnnnnnnnnnnnnnnnnnnnnnnnnnnnnnnnnnnnnnnnnnnnnnnnnnnnnnnnnnnnnnnnnnnnnnnnnnnnnnnnnnnnnnnnnnnnnnnnnnnnnnnnnnnnnnnnnnnnnnnnnnnnnnnnnnnnnnnnnnnnnnnnnnnnnnnnnnnnnnnnnnnnnnnnnnnnnnnnnnnnnnnnnnnnnnnnnnnnnnnnnnnnnnnnnnnnnnnnnnnnnnnnnnnnnnnnnnnnnnnnnnnnnnnnnnnnnnnnnnnnnnnnnnnnnnnnnnnnnnnnnnnnnnnnnnnnnnnnnnnnnnnnnnnnnnnnnnnnnnnnnnnnnnnnnnnnnnnnnnnnnnnnnnnnnnnnnnnnnnnnnnnnnnnnnnnnnnnnnnnnnnnnnnnnnnnnnnnnnnnnnnnnnnnnnnnnnnnnnnnnnnnnnnnnnnnnnnnnnnnnnnnnnnnnnnnnnnnnnnnnnnnnnnnnnnnnnnnnnnnnnnnnnnnnnnnnnnnnnnnnnnnnnnnnnnnnnnnnnnnnnnnnnnnnnnnnnnnnnnnnnnnnnnnnnnnnnnnnnnnnnnnnnnnnnnnnnnnnnnnnnnnnnnnnnnnnnnnnnnnnnnnnnnnnnnnnnnnnnnnnnnnnnnnnnnnnnnnnnnnnnnnnnnnnnnnnnnnnnnnnnnnnnnnnnnnnnnnnnnnnnnnnnnnnnnnnnnnnnnnnnnnnnnnnnnnnnnnnnnnnnnnnnnnnnnnnnnnnnnnnnnnnnnnnnnnnnnnnnnnnnnnnnnnnnnnnnnnnnaatccgcactggcgaattcctaactcctcagtcagaacaaattcctcagcgaccagaagagcttcgtctctgtcactgaagaaagtgactggactgtatgagatttccaannnnnnnnnnnnnnnnnnnnnnnnnnnnnnnnnnnnnnnnnnnnnnnnnnnnnnnnnnnnnnnnnnnnnnnnnnnnnnnnnnnnnnnnnnnnnnnnnnnnnnnnnnnnnnnnnnnnnnnnnnnnnnnnnnnnnnnnnnnnnnnnnnnnnnnnnnnnnnnnnnnnnnnnnnnnnnnnnnnnnnnnnnnnnnnnnnnnnnnnnnnnnnnnnnnnnnnnnnnnnnnnnnnnnnnnnnnnnnnnnnnnnnnnnnnnnnnnnnnnnnnnnnnnnnnnnnnnnnnnnnnnnnnnnnnnnnnnnnnnnnnnnnnnnnnnnnnnnnnnnnnnnnnnnnnnnnnnnnnnnnnnnnnnnnnnnnnnnnnnnnnnnnnnnnnnnnnnnnnnnnnnnnnnnnnnnnnnnnnnnnnnngtggcgagaatgacgcttcggcagcttgtttggcggttgaaatctcaatgtaatttttattatgtttaagatactttgtacttccgctgatttttgataatagatctggatcattttcgcaaaaagaaatcgacacctcttttagaataaaccccatttgagagagagtatgtatgtgacaccactagtaagagaaagtctcgattcaaaattttccatggaattttttttggatatccacgagtatacacactcgcgccgaatttgcactagagcagggccaaacatttgctacaaacaaaaaggagacctccctagatatcgaatccgacttggaaacgaacacgggaacgcaaaattgaaggtgttgcggctcctaannnnnnnnnnnnnnnnnnnnnnnnnnnnnnnnnnnnnnnnnnnnnnnnnnnnnncgcgggaaaacggttttgcggggcggcgtgggtggccgcagagtcaaaccccgcaaaacggacccgtataaaaggatattcgtggaatatgctcttatacgggtcggctttgcggggtctgctcgggcgccgctcccatcggcctgcaaatccaaaatttgcaattcaatttcacacatgaaaataccgggacctagccgatccccaactagtgctagtagagtaagattatattcagccacgtcgtgcctccctatatctaatccatcgcttggcggctgagtaaaaactcttgctctctggctttcatacgaagtcgccccctcccctcccttccgcgtttctctcgtgagcaaccggggggatccctagccgctgcggcctgagccccctctcctctgctccccctgccaccgcccagtgatgccgtcgggcgaagcccgaccggcgggggcagtggtggggcctctcctccccctcgttctctatggctggcgcgagacggccggtcgagcgggcgcgccgggctatggcggggtcggcggcccggtggtgtgcttcatgttcagtgacggggttgcttggtgggcacgcgttggtgagtggcgggctcgcctgcactgtggcggccacgatggttccagatctgggtggtggtgtgctagcacggacccggcccaatccaccaggatccgactcctggatggcggcaagcgacgcggggcattggtagaggtccgtgttgacctctgcgtgggattgtctgtagcaacgctgctgcggccacggtggttgttcggtctgcgcgcgacaatggtgggtgtatcctacggcggtttgtctgtgtcgggctcgggtgagctgcctccctcttctatggattcagcgacgggctcgtcaggccggggtagctccatggtgtggtgtgggtgcgcgcgaggcctgctggaggtggcaggggacttcgggaagggggcagggtgccccctccattgcatctggcggctgctttgggcggccgccggaattcccctcgcccggatccggccgccaaagccatcgaccatgccaatgtgtcggctttgcggtgtaaggggatcttccgcttcgttctggtctgccgtgtcggtttggtgtgtcctggttgagggtgggtctcggatgccgtggcgtcgcccggttggtgtgagtcggggtgctcatgtgcggagcacgcgtctcgggcgctgtccggtcaccatggccgtgtgggcggcgtgttagaccggggtggggcgttcaatgcaggcacagtcgtctgtaacccaatccggtgacgttgagtgttggccagggtgaatacacgttctgctttgccaggcccannnnnnnnnnnnnnnnnnnnnnnnnnnnnnnnnnnnnnnnnnnnnnnnnnnnnnnnnnnnnnnnnnnnnnnnnnnnnnnnnnnnnnnnnnnnnnnnnnnnnnnnnnnnnnnnnnnnnnnnnnnnnnnnnnnnnnnnnnnnnnnnnnnnnnnnntcattgttcgtcttacatggcttcccctcttcgcggtggctcatccacggccgagggccccggcaactccatagtagtagtgctttttgttttcatatgatgtttgctaggatttttttttggggtagtggttgttttcagcgtcattgtatccggcctnnnnnnnnnnnnnnnnnnnnnnnnnnnnnnnatcggcaggttttggtttgttcgatgatgctttatctataaagcggggtgaaatcctttttcgtaaaannnnnnnnnnnnnnnnnnnnnnnnnnnnnnnnnnnnnnnnnnnnnnnnnnnnnnnnnnnnnnnnnnnnnnnnnnnnnnnnnnnnnnnnnnnnnnnnaaatggcaagacacggtggctggaggtccccatcgccaatccggaggttcaatctacgcaaccacaggagccgcgcgtcttcctctgccagatcttcctcaaatagccgtagccgccgccgcccctctccggcttcccagacatccccgcgcagcggccatcgtagaggacctaccacagcttccggcagcgggggtgggggacttgggtgaccgagatccgggatagggagaccagccaacgccattggctagactccttccacacggccgaactcaccgcgctcgagtacgactggtttatgtagcnnnnnnnnnnnnnnnnnnnnnnnnnnnnnnnnnnnnnnnnnnnnnnnnnnnnnnnnnnnnnnnnnnnnnnnnnnnnnnnnnnnnnnnnnnnnnnnnnnnnnnnnnnnnnnnnnnnnnnnnnnnnnnnnnnnnnnnnnnnnnnnnnnnnnnnnnnnnnnnnnnnnnnnnnnnnnnnnnnnnnnnnnnnnnnnnnnnnnnnnnnnnnnnnnnnnnnnnnnnnnnnnnnnnnnnnnnnnnnnnnnnnnnnnnnnnnnnnnnnnnnnnnnnnnnnnnnnnnnnnnnnnnnnnnnnnnnnnnnnnnnnnnnnnnnnnnnnnnnnnnnnnnnnnnnnnnnnnnnnnnnnnnnnnnnnnnnnnnnnnnnnnnnnnnnnnnnnnnnnnnnnnnnnnnnnnnnnnnnnnnnnnnnnnnnnnnnnnnnnnnnnnnnnnnnnnnnnnnnnnnnnnnnnnnnnnnnnnnnnnnnnnnnnnnnnnnnnnnnnnnnnnnnnnnnnnnnnnnnnnnnnnnnnnnnnnnnnnnnnnnnnnnnnnnnnnnnnnnnnnnnnnnnnnnnnnnnnnnnnnnnnnnnnnnnnnnnnnnnnnnnnnnnnnnnnnnnnnnnnnnnnnnnnnnnnnnnnnnnnnnnnnnnnnnnnnnnnnnnnnnnnnnnnnnnnnnnnnnnnnnnnnnnnnnnnnnnnnnnnnnnnnnnnnnnnnnnnnnnnnnnnnnnnnnnnnnnnnnnnnnnnnnnnnnnnnnnnnnnnnnnnnnnnnnnnnnnnnnnnnnnnnnnnnnnnnnnnnnnnnnnnnnnnnnnnnnnnnnnnnnnnnnnnnnnnnnnnnnnnnnnnnnnnnnnnnnnnnnnnnnnnnnnnnnnnnnnnnnnnnnnnnnnnnnnnnnnnnnnnnnnnnnnnnnnnnnnnnnnnnnnnnnnnnnnnnnnnnnnnnnnnnnnnnnnnnnnnnnnnnnnnnnnnnnnnnnnnnnnnnnnnnnnnnnnnnnnnnnnnnnnnnnnnnnnnnnnnnnnnnnnnnnnnnnnnnnnnnnnnnnnnnnnnnnnnnnnnnnnnnnnnnnnnnnnnnnnnnnnnnnnnnnnnnnnnnnnnnnnnnnnnnnnnnnnnnnnnnnnnnnnnnnnnnnnnnnnnnnnnnnnnnnnnnnnnnnnnnnnnnnnnnnnnnnnnnnnnnnnnnnnnnnnnnnnnnnnnnnnnnnnnnnnnnnnnnnnnnnnnnnnnnnnnnnnnnnnnnnnnnnnnnnnnnnnnnnnnnnnnnnnnnnnnnnnnnnnnnnnnnnnnnnnnnnnnnnnnnnnnnnnnnnnnnnnnnnnnnnnnnnnnnnnnnnnnnnnnnnnnnnnnnnnnnnnnnnnnnnnnnnnnnnnnnnnnnnnnnnnnnnnnnnnnnnnnnnnnnnnnnnnnnnnnnnnnnnnnnnnnnnnnnnnnnnnnnnnnnnnnnnnnnnnnnnnnnnnnnnnnnnnnnnnnnnnnnnnnnnnnnnnnnnnnnnnnnnnnnnnnnnnnnnnnnnnnnnnnnnnnnnnnnnnnnnnnnnnnnnnnnnnnnnnnnnnnnnnnnnnnnnnnnnnnnnnnnnnnnnnnnnnnnnnnnnnnnnnnnnnnnnnnnnnnnnnnnnnnnnnnnnnnnnnnnnnnnnnnnnnnnnnnnnnnnnnnnnnnnnnnnnnnnnnnnnnnnnnnnnnnnnnnnnnnnnnnnnnnnnnnnnnnnnnnnnnnnnnnnnnnnnnnnnnnnnnnnnnnnnnnnnnnnnnnnnnnnnnnnnnnnnnnnnnnnnnnnnnnnnnnnnnnnnnnnnnnnnnnnnnnnnnntccccactttttgctccacttattcctctccctgaactttattaacccatccatttataacagcactggcgaaagacttccgaggggctttacannnnnnnnnnnnnnnnnnnnnnnnnnnnnnnnnnnnnnnnnnnnnnnnnnnnnnnnnnnnnnnnnnnnnnnnnnnnnnnnnnnnnnnnnnnnnnnnnnnnnnnnnnnnnnnnnnnnnnnnnnnnnnnnnnnnnnnnnnnnnnnnnnnnnnnnnnnnnnnnnnnnnnnnnnnnnnnnnnnnnnnnnnntccccgaaaggattccctcattctgccttacccaccgcactatatcatgcttcgaaggggaggcgttcgacataccatgctactcctggagcgactccaaagagagcggctcccgcaccgggcaagccttcgaggaggaaggcaggcgaagagccggtcgggcccttgttagagatgtatgggtttgcaaatatgtgttttaatagtcgcatccaattgtgactttcatgttcatcctgtatcnnnnnnnnnnnnnnnnnnnnnnnnnnnnnnnnnnnnnnnnnnnnnnnnnnnnnnnnnnnnnnnnnnnnnnnnnnnnnnnnnnnnnnnnnnnnnnnnnnnnnnnnnnnnnnnnnnnnnnnnnnnnnnnnnnnnnnnnnnnnnnnnnnnnnnnnnnnnnnnnnnnnnnnnnnnnnnnnnnnnnnnnnnnnnnnnnnnnnnnnnnnnnnnnnnnnnnnnnnnnnnnnnnnnnnnnnnnnnnnnnnnnnnnnnnnnnnnnnnnnnnnnnnnnnnnnnnnnnnnnnnnnnnnnnnnnnnnnnnnnnnnnnnnnnnnnnnnnnnnnnnnnnnnnnnnnnnnnnnnnnnnnnnnnnnnnnnnnnnnnnnnnnnnnnnnnnnnnnnnnnnnnnnnnnnnnnnnnnnnnnnnnnnnnnnnnnnnnnnnnnnnnnnnnnnnnnnnnnnnnnnnnnnnnnnnnnnnnnnnnnnnnnnnnnnnnnnnnnnnnnnnnnnnnnnnnnnnnnnnnnnnnnnnnnnnnnnnnnnnnnnnnnnggttcccctccatcgaggaataacaattatacagtagttgtgctaatactgttgctgatctcataataggatccttgggtcaactgcaagagaagttaaaaaccgctcaagcgggagagaaagaggcaaaaagactacacgccgcaggcgagcgtatcatggtctgagtcagagnnnnnnnnnnnnnnnnnnnnnnnnnnnnnnnnnnnnnnnnnnnnnnnnnnnnnnnnnnnnnnnnnnnnnnnnnnnnnnnnnnnnnnnnnnnnnnnnnnnnnnnnnnnnnnnnnnnnnnnnnnnnnnnnnnnnnnnnnnnnnnnnnnnnnnnnnnnnnnnnnnnnnnnnnnnnnnnnnnnnnnnnnnnnnnnnnnnnnnnnnnnnnnnnnnnnnnnnnnnnnnnnnnnnnnnnnnnnnnnnnnnnnnnnnnnnnnnnnnnnnnnnnnnnnnnnnnnnnnnnnnnnnnnnnnnnnnnnnnnnnnnnnnnnnnnnnnnnnnnnnnnnnnnnnnnnnnnnnnnnnnnnnnnnnnnnnnnnnnnnnnnnnnnnnnnnnnnnnnnnnnnnnnnnnnnnnnnnnnnnnnnnnnnnnnnnnnnnnnnnnnnnnnnnnnnnnnnnnnnnnnnnnnnnnnnnnnnnnnnnnnnnnnnnnnnnnnnnnnnnnnnnnnnnnnnnnnnnnnnnnnnnnnnnnnnnnnnnnnnnnnnnnnnnnnnnnnnnnnnnnnnnnnnnnnnnnnnnnnnnnnnnnnnnnnnnnnnnnnnnnnnnnnnnnnnnnnnnnnnnnnnnnnnnnnnnnnnnnnnnnnnnnnnnnnnnnnnnnnnnnnnnnnnnnnnnnnnnnnnnnnnnnnnnnnnnnnnnnnnnnnnnnnnnnnnnnnnnnnnnnnnnnnnnnnnnnnnnnnnnnnnnnnnnnnnnnnnnnnnnnnnnnnnnnnnnnnnnnnnnnnnnnnnnnnnnnnnnnnnnnnnnnnnnnnnnnnnnnnnnnnnnnnnnnnnnnnnnnnnnnnnnnnnnnnnnnnnnnnnnnnnnnnnnnnnnnnnnnnnnnnnnnnnnnnnnnnnnnnnnnnnnnnnnnnnnnnnnnnnnnnnnnnnnnnnnnnnnnnnnnnnnnnnnnnnnnnnnnnnnnnnnnnnnnnnnnnnnnnnnnnnnnnnnnnnnnnnnnnnnnnnnnnnnnnnnnnnnnnnnnnnnnnnnnnnnnnnnnnnnnnnnnnnnnnnnnnnnnnnnnnnnnnnnnnnnnnnnnnnnnnnnnnnnnnnnnnnnnnnnnnnnnnnnnnnnnnnnnnnnnnnnnnnnnnnnnnnnnnnnnnnnnnnnnnnnnnnnnnnnnnnnnnnnnnnnnnnnnnnnnnnnnnnnnnnnnnnnnnnnnnnnnnnnnnnnnnnnnnnnnnnnnnnnnnnnnnnnnnnnnnnnnnnnnnnnnnnnnnnnnnnnnnnnnnnnnnnnnnnnnnnnnnnnnnnnnnnnnnnnnnnnnnnnnnnnnnnnnnnnnnnnnnnnnnnnnnnnnnnnnnnnnnnnnnnnnnnnnnnnnnnnnnnnnnnnnnnnnnnnnnnnnnnnnnnnnnnnnnnnnnnnnnnnnnnnnnnnnnnnnnnnnnnnnnnnnnnnnnnnnnnnnnnnnnnnnnnnnnnnnnnnnnnnnnnnnnnnnnnnnnnnnnnnnnnnnnnnnnnnnnnnnnnnnnnnnnnnnnnnnnnnnnnnnnnnnnnnnnnnnnnnnnnnnnnnnnnnnnnnnnnnnnnnnnnnnnnnnnnnnnnnnnnnnnnnnnnnnnnnnnnnnnnnnnnnnnnnnnnnnnnnnnnnnnnnnnnnnnnnnnnnnnnnnnnnnnnnnnnnnnnnnnnnnnnnnnnnnnnnnnnnnnnnnnnnnnnnnnnnnnnnnnnnnnnnnnnnnnnnnnnnnnnnnnnnnnnnnnnnnnnnnnnnnnnnnnnnnnnnnnnnnnnnnnnnnnnnnnnnnnnnnnnnnnnnnnnnnnnnnnnnnnnnnnnnnnnnnnnnnnnnnnnnnnnnnnnnnnnnnnnnnnnnnnnnnnnnnnnnnnnnnnnnnnnnnnnnnnnnnnnnnnnnnnnnnnnnnnnnnnnnnnnnnnnnnnnnnnnnnnnnnnnnnnnnnnnnnnnnnnnnnnnnnnnnnnnnnnnnnnnnnnnnnnnnnnnnnnnnnnnnnnnnnnnnnnnnnnnnnnnnnnnnnnnnnnnnnnnnnnnnnnnnnnnnnnnnnnnnnnnnnnnnnnnnnnnnnnnnnnnnnnnnnnnnnnnnnnnnnnnnnnnnnnnnnnnnnnnnnnnnnnnnnnnnnnnnnnnnnnnnnnnnnnnnnnnnnnnnnnnnnnnnnnnnnnnnnnnnnnnnnnnnnnnnnnnnnnnnnnnnnnnnnnnnnnnnnnnnnnnnnnnnnnnnnnnnnnnnnnnnnnnnnnnnnnnnnnnnnnnnnnnnnnnnnnnnnnnnnnnnnnnnnnnnnnnnnnnnnnnnnnnnnnnnnnnnnnnnnnnnnnnnnnnnnnnnnnnnnnnnnnnnnnnnnnnnnnnnnnnnnnnnnnnnnnnnnnnnnnnnnnnnnnnnnnnnnnnnnnnnnnnnnnnnnnnnnnnnnnnnnnnnnnnnnnnnnnnnnnnnnnnnnnnnnnnnnnnnnnnnnnnnnnnnnnnnnnnnnnnnnnnnnnnnnnnnnnnnnnnnnnnnnnnnnnnnnnnnnnnnnnnnnnnnnnnnnnnnnnnnnnnnnnnnnnnnnnnnnnnnnnnnnnnnnnnnnnnnnnnnnnnnnnnnnnnnnnnnnnnnnnnnnnnnnnnnnnnnnnnnnnnnnnnnnnnnnnnnnnnnnnnnnnnnnnnnnnnnnnnnnnnnnnnnnnnnnnnnnnnnnnnnnnnnnnnnnnnnnnnnnnnnnnnnnnnnnnnnnnnnnnnnnnnnnnnnnnnnnnnnnnnnnnnnnnnnnnnnnnnnnnnnnnnnnnnnnnnnnnnnnnnnnnnnnnnnnnnnnnnnnnnnnnnnnnnnnnnnnnnnnnnnnnnnnnnnnnnnnnnnnnnnnnnnnnnnnnnnnnnnnnnnnnnnnnnnnnnnnnnnnnnnnnnnnnnnnnnnnnnnnnnnnnnnnnnnnnnnnnnnnnnnnnnnnnnnnnnnnnnnnnnnnnnnnnnnnnnnnnnnnnnnnnnnnnnnnnnnnnnnnnnnnnnnnnnnnnnnnnnnnnnnnnnnnnnnnnnnnnnnnnnnnnnnnnnnnnnnnnnnnnnnnnnnnnnnnnnnnnnnnnnnnnnnnnnnnnnnnnnnnnnnnnnnnnnnnnnnnnnnnnnnnnnnnnnnnnnnnnnnnnnnnnnnnnnnnnnnnnnnnnnnnnnnnnnnnnnnnnnnnnnnnnnnnnnnnnnnnnnnnnnnnnnnnnnnnnnnnnnnnnnnnnnnnnnnnnnnnnnnnnnnnnnnnnnnnnnnnnnnnnnnnnnnnnnnnnnnnnnnnnnnnnnnnnnnnnnnnnnnnnnnnnnnnnnnnnnnnnnnnnnnnnnnnnnnnnnnnnnnnnnnnnnnnnnnnnnnnnnnnnnnnnnnnnnnnnnnnnnnnnnnnnnnnnnnnnnnnnnnnnnnnnnnnnnnnnnnnnnnnnnnnnnnnnnnnnnnnnnnnnnnnnnnnnnnnnnnnnnnnnnnnnnnnnnnnnnnnnnnnnnnnnnnnnnnnnnnnnnnnnnnnnnnnnnnnnnnnnnnnnnnnnnnnnnnnnnnnnnnnnnnnnnnnnnnnnnnnnnnnnnnnnnnnnnnnnnnnnnnnnnnnnnnnnnnnnnnnnnnnnnnnnnnnnnnnnnnnnnnnnnnnnnnnnnnnnnnnnnnnnnnnnnnnnnnnnnnnnnnnnnnnnnnnnnnnnnnnnnnnnnnnnnnnnnnnnnnnnnnnnnnnnnnnnnnnnnnnnnnnnnnnnnnnnnnnnnnnnnnnnnnnnnnnnnnnnnnnnnnnnnnnnnnnnnnnnnnnnnnnnnnnnnnnnnnnnnnnnnnnnnnnnnnnnnnnnnnnnnnnnnnnnnnnnnnnnnnnnnnnnnnnnnnnnnnnnnnnnnnnnnnnnnnnnnnnnnnnnnnnnnnnnnnnnnnnnnnnnnnnnnnnnnnnnnnnnnnnnnnnnnnnnnnnnnnnnnnnnnnnnnnnnnnnnnnnnnnnnnnnnnnnnnnnnnnnnnnnnnnnnnnnnnnnnnnnnnnnnnnnnnnnnnnnnnnnnnnnnnnnnnnnnnnnnnnnnnnnnnnnnnnnnnnnnnnnnnnnnnnnnnnnnnnnnnnnnnnnnnnnnnnnnnnnnnnnnnnnnnnnnnnnnnnnnnnnnnnnnnnnnnnnnnnnnnnnnnnnnnnnnnnnnnnnnnnnnnnnnnnnnnnnnnnnnnnnnnnnnnnnnnnnnnnnnnnnnnnnnnnnnnnnnnnnnnnnnnnnnnnnnnnnnnnnnnnnnnnnnnnnnnnnnnnnnnnnnnnnnnnnnnnnnnnnnnnnnnnnnnnnnnnnnnnnnnnnnnnnnnnnnnnnnnnnnnnnnnnnnnnnnnnnnnnnnnnnnnnnnnnnnnnnnnnnnnnnnnnnnnnnnnnnnnnnnnnnnnnnnnnnnnnnnnnnnnnnnnnnnnnnnnnnnnnnnnnnnnnnnnnnnnnnnnnnnnnnnnnnnnnnnnnnnnnnnnnnnnnnnnnnnnnnnnnnnnnnnnnnnnnnnnnnnnnnnnnnnnnnnnnnnnnnnnnnnnnnnnnnnnnnnnnnnnnnnnnnnnnnnnnnnnnnnnnnnnnnnnnnnnnnnnnnnnnnnnnnnnnnnnnnnnnnnnnnnnnnnnnnnnnnnnnnnnnnnnnnnnnnnnnnnnnnnnnnnnnnnnnnnnnnnnnnnnnnnnnnnnnnnnnnnnnnnnnnnnnnnnnnnnnnnnnnnnnnnnnnnnnnnnnnnnnnnnnnnnnnnnnnnnnnnnnnnnnnnnnnnnnnnnnnnnnnnnnnnnnnnnnnnnnnnnnnnnnnnnnnnnnnnnnnnnnnnnnnnnnnnnnnnnnnnnnnnnnnnnnnnnnnnnnnnnnnnnnnnnnnnnnnnnnnnnnnnnnnnnnnnnnnnnnnnnnnnnnnnnnnnnnnnnnnnnnnnnnnnnnnnnnnnnnnnnnnnnnnnnnnnnnnnnnnnnnnnnnnnnnnnnnnnnnnnnnnnnnnnnnnnnnnnnnnnnnnnnnnnnnnnnnnnnnnnnnnnnnnnnnnnnnnnnnnnnnnnnnnnnnnnnnnnnnnnnnnnnnnnnnnnnnnnnnnnnnnnnnnnnnnnnnnnnnnnnnnnnnnnnnnnnnnnnnnnnnnnnnnnnnnnnnnnnnnnnnnnnnnnnnnnnnnnnnnnnnnnnnnnnnnnnnnnnnnnnnnnnnnnnnnnnnnnnnnnttttgtgagatgacgtttannnnnnnnnnnnnnnnnnnnnnnnnnnnnnnnnnnnnnnnnnnnnnnnnnnnnnnnnnnnnnnnnnnnnnnnnnnnnnnnnnnnnnnnnnnnnnnnnnnnnnnnnnnnnnnnnnnnnnnnnnnnnnnnnnnnnnnnnnnnnnnnnnnnnnnnnnnnnnnnnnnnnnnnnnnnnnnnnnnnnnnnnnnnnnnnnnnnnnnnnnnnnnnnnnnnnnnnnnnnnnnnnnnnnnnnnnnnnnnnnnnnnnnnnnnnnnnnnnnnnnnnnnnnnnnnnnnnnnnnnnnnnnnnnnnnnnnnnnnnnnnnnnnnnnnnnnnnnnnnnnnnnnnnnnnnnnnnnnnnnnnnnnnnnnnnnnnnnnnnnnnnnnnnnnnnnnnnnnnnnnnnnnnnnnnnnnnnnnnnnnnnnnnnnnnnnnnnnnnnnnnnnnnnnnnnnnnnnnnnnnnnnnnnnnnnnnnnnnnnnnnnnnnnnnnnnnnnnnnnnnnnnnnnnnnnnnnnnnnnnnnnnnnnnnnnnnnnnnnnnnnnnnnnnnnnnnnnnnnnnnnnnnnnnnnnnnnnnnnnnnnnnnnnnnnnnnnnnnnnnnnnnnnnnnnnnnnnnnnnnnnnnnnnnnnnnnnnnnnnnnnnnnnnnnnnnnnnnnnnnnnnnnnnnnnnnnnnnnnnnnnnnnnnnnnnnnnnnnnnnnnnnnnnnnnnnnnnnnnnnnnnnnnnnnnnnnnnnnnnnnnnnnnnnnnnnnnnnnnnnnnnnnnnnnnnnnnnnnnnnnnnnnnnnnnnnnnnnnnnnnnnnnnnnnnnnnnnnnnnnnnnnnnnnnnnnnnnnnnnnnnnnnnnnnnnnnnnnnnnnnnnnnnnnnnnnnnnnnnnnnnnnnnnnnnnnnnnnnnnnnnnnnnnnnnnnnnnnnnnnnnnnnnnnnnnnnnnnnnnnnnnnnnnnnnnnnnnnnnnnnnnnnnnnnnnnnnnnnnnnnnnnnnnnnnnnnnnnnnnnnnnnnnnnnnnnnnnnnnnnnnnnnnnnnnnnnnnnnnnnnnnnnnnnnnnnnnnnnnnnnnnnnnnnnnnnnnnnnnnnnnnnnnnnnnnnnnnnnnnnnnnnnnnnnnnnnnnnnnnnnnnnnnnnnnnnnnnnnnnnnnnnnnnnnnnnnnnnnnnnnnnnnnnnnnnnnnnnnnnnnnnnnnnnnnnnnnnnnnnnnnnnnnnnnnnnnnnnnnnnnnnnnnnnnnnnnnnnnnnnnnnnnnnnnnnnnnnnnnnnnnnnnnnnnnnnnnnnnnnnnnnnnnnnnnnnnnnnnnnnnnnnnnnnnnnnnnnnnnnnnnnnnnnnnnnnnnnnnnnnnnnnnnnnnnnnnnnnnnnnnnnnnnnnnnnnnnnnnnnnnnnnnnnnnnnnnnnnnnnnnnnnnnnnnnnnnnnnnnnnnnnnnnnnnnnnnnnnnnnnnnnnnnnnnnnnnnnnnnnnnnnnnnnnnnnnnnnnnnnnnnnnnnnnnnnnnnnnnnnnnnnnnnnnnnnnnnnnnnnnnnnnnnnnnnnnnnnnnnnnnnnnnnnnnnnnnnnnnnnnnnnnnnnnnnnnnnnnnnnnnnnnnnnnnnnnnnnnnnnnnnnnnnnnnnnnnnnnnnnnnnnnnnnnnnnnnnnnnnnnnnnnnnnnnnnnnnnnnnnnnnnnnnnnnnnnnnnnnnnnnnnnnnnnnnnnnnnnnnnnnnnnnnnnnnnnnnnnnnnnnnnnnnnnnnnnnnnnnnnnnnnnnnnnnnnnnnnnnnnnnnnnnnnnnnnnnnnnnnnnnnnnnnnnnnnnnnnnnnnnnnnnnnnnnnnnnnnnnnnnnnnnnnnnnnnnnnnnnnnnnnnnnnnnnnnnnnnnnnnnnnnnnnnnnnnnnnnnnnnnnnnnnnnnnnnnnnnnnnnnnnnnnnnnnnnnnnnnnnnnnnnnnnnnnnnnnnnnnnnnnnnnnnnnnnnnnnnnnnnnnnnnnnnnnnnnnnnnnnnnnnnnnnnnnnnnnnnnnnnnnnnnnnnnnnnnnnnnnnnnnnnnnnnnnnnnnnnnnnnnnnnnnnnnnnnnnnnnnnnnnnnnnnnnnnnnnnnnnnnnnnnnnnnnnnnnnnnnnnnnnnnnnnnnnnnnnnnnnnnnnnnnnnnnnnnnnnnnnnnnnnnnnnnnnnnnnnnnnnnnnnnnnnnnnnnnnnnnnnnnnnnnnnnnnnnnnnnnnnnnnnnnnnnnnnnnnnnnnnnnnnnnnnnnnnnnnnnnnnnnnnnnnnnnnnnnnnnnnnnnnnnnnnnnnnnnnnnnnnnnnnnnnnnnnnnnnnnnnnnnnnnnnnnnnnnnnnnnnnnnnnnnnnnnnnnnnnnnnnnnnnnnnnnnnnnnnnnnnnnnnnnnnnnnnnnnnnnnnnnnnnnnnnnnnnnnnnnnnnnnnnnnnnnnnnnnnnnnnnnnnnnnnnnnnnnnnnnnnnnnnnnnnnnnnnnnnnnnnnnnnnnnnnnnnnnnnnnnnnnnnnnnnnnnnnnnnnnnnnnnnnnnnnnnnnnnnnnnnnnnnnnnnnnnnnnnnnnnnnnnnnnnnnnnnnnnnnnnnnnnnnnnnnnnnnnnnnnnnnnnnnnnnnnnnnnnnnnnnnnnnnnnnnnnnnnnnnnnnnnnnnnnnnnnnnnnnnnnnnnnnnnnnnnnnnnnnnnnnnnnnnnnnnnnnnnnnnnnnnnnnnnnnnnnnnnnnnnnnnnnnnnnnnnnnnnnnnnnnnnnnnnnnnnnnnnnnnnnnnnnnnnnnnnnnnnnnnnnnnnnnnnnnnnnnnnnnnnnnnnnnnnnnnnnnnnnnnnnnnnnnnnnnnnnnnnnnnnnnnnnnnnnnnnnnnnnnnnnnnnnnnnnnnnnnnnnnnnnnnnnnnnnnnnnnnnnnnnnnnnnnnnnnnnnnnnnnnnnnnnnnnnnnnnnnnnnnnnnnnnnnnnnnnnnnnnnnnnnnnnnnnnnnnnnnnnnnnnnnnnnnnnnnnnnnnnnnnnnnnnnnnnnnnnnnnnnnnnnnnnnnnnnnnnnnnnnnnnnnnnnnnnnnnnnnnnnnnnnnnnnnnnnnnnnnnnnnnnnnnnnnnnnnnnnnnnnnnnnnnnnnnnnnnnnnnnnnnnnnnnnnnnnnnnnnnnnnnnnnnnnnnnnnnnnnnnnnnnnnnnnnnnnnnnnnnnnnnnnnnnnnnnnnnnnnnnnnnnnnnnnnnnnnnnnnnnnnnnnnnnnnnnnnnnnnnnnnnnnnnnnnnnnnnnnnnnnnnnnnnnnnnnnnnnnnnnnnnnnnnnnnnnnnnnnnnnnnnnnnnnnnnnnnnnnnnnnnnnnnnnnnnnnnnnnnnnnnnnnnnnnnnnnnnnnnnnnnnnnnnnnnnnnnnnnnnnnnnnnnnnnnnnnnnnnnnnnnnnnnnnnnnnnnnnnnnnnnnnnnnnnnnnnnnnnnnnnnnnnnnnnnnnnnnnnnnnnnnnnnnnnnnnnnnnnnnnnnnnnnnnnnnnnnnnnnnnnnnnnnnnnnnnnnnnnnnnnnnnnnnnnnnnnnnnnnnnnnnnnnnnnnnnnnnnnnnnnnnnnnnnnnnnnnnnnnnnnnnnnnnnnnnnnnnnnnnnnnnnnnnnnnnnnnnnnnnnnnnnnnnnnnnnnnnnnnnnnnnnnnnnnnnnnnnnnnnnnnnnnnnnnnnnnnnnnnnnnnnnnnnnnnnnnnnnnnnnnnnnnnnnnnnnnnnnnnnnnnnnnnnnnnnnnnnnnnnnnnnnnnnnnnnnnnnnnnnnnnnnnnnnnnnnnnnnnnnnnnnnnnnnnnnnnnnnnnnnnnnnnnnnnnnnnnnnnnnnnnnnnnnnnnnnnnnnnnnnnnnnnnnnnnnnnnnnnnnnnnnnnnnnnnnnnnnnnnnnnnnnnnnnnnnnnnnnnnnnnnnnnnnnnnnnnnnnnnnnnnnnnnnnnnnnnnnnnnnnnnnnnnnnnnnnnnnnnnnnnnnnnnnnnnnnnnnnnnnnnnnnnnnnnnnnnnnnnnnnnnnnnnnnnnnnnnnnnnnnnnnnnnnnnnnnnnnnnnnnnnnnnnnnnnnnnnnnnnnnnnnnnnnnnnnnnnnnnnnnnnnnnnnnnnnnnnnnnnnnnnnnnnnnnnnnnnnnnnnnnnnnnnnnnnnnnnnnnnnnnnnnnnnnnnnnnnnnnnnnnnnnnnnnnnnnnnnnnnnnnnnnnnnnnnnnnnnnnnnnnnnnnnnnnnnnnnnnnnnnnnnnnnnnnnnnnnnnnnnnnnnnnnnnnnnnnnnnnnnnnnnnnnnnnnnnnnnnnnnnnnnnnnnnnnnnnnnnnnnnnnnnnnnnnnnnnnnnnnnnnnnnnnnnnnnnnnnnnnnnnnnnnnnnnnnnnnnnnnnnnnnnnnnnnnnnnnnnnnnnnnnnnnnnnnnnnnnnnnnnnnnnnnnnnnnnnnnnnnnnnnnnnnnnnnnnnnnnnnnnnnnnnnnnnnnnnnnnnnnnnnnnnnnnnnnnnnnnnnnnnnnnnnnnnnnnnnnnnnnnnnnnnnnnnnnnnnnnnnnnnnnnnnnnnnnnnnnnnnnnnnnnnnnnnnnnnnnnnnnnnnnnnnnnnnnnnnnnnnnnnnnnnnnnnnnnnnnnnnnnnnnnnnnnnnnnnnnnnnnnnnnnnnnnnnnnnnnnnnnnnnnnnnnnnnnnnnnnnnnnnnnnnnnnnnnnnnnnnnnnnnnnnnnnnnnnnnnnnnnnnnnnnnnnnnnnnnnnnnnnnnnnnnnnnnnnnnnnnnnnnnnnnnnnnnnnnnnnnnnnnnnnnnnnnnnnnnnnnnnnnnnnnnnnnnnnnnnnnnnnnnnnnnnnnnnnnnnnnnnnnnnnnnnnnnnnnnnnnnnnnnnnnnnnnnnnnnnnnnnnnnnnnnnnnnnnnnnnnnnnnnnnnnnnnnnnnnnnnnnnnnnnnnnnnnnnnnnnnnnnnnnnnnnnnnnnnnnnnnnnnnnnnnnnnnnnnnnnnnnnnnnnnnnnnnnnnnnnnnnnnnnnnnnnnnnnnnnnnnnnnnnnnnnnnnnnnnnnnnnnnnnnnnnnnnnnnnnnnnnnnnnnnnnnnnnnnnnnnnnnnnnnnnnnnnnnnnnnnnnnnnnnnnnnnnnnnnnnnnnnnnnnnnnnnnnnnnnnnnnnnnnnnnnnnnnnnnnnnnnnnnnnnnnnnnnnnnnnnnnnnnnnnnnnnnnnnnnnnnnnnnnnnnnnnnnnnnnnnnnnnnnnnnnnnnnnnnnnnnnnnnnnnnnnnnnnnnnnnnnnnnnnnnnnnnnnnnnnnnnnnnnnnnnnnnnnnnnnnnnnnnnnnnnnnnnnnnnnnnnnnnnnnnnnnnnnnnnnnnnnnnnnnnnnnnnnnnnnnnnnnnnnnnnnnnnnnnnnnnnnnnnnnnnnnnnnnnnnnnnnnnnnnnnnnnnnnnnnnnnnnnnnnnnnnnnnnnnnnnnnnnnnnnnnnnnnnnnnnnnnnnnnnnnnnnnnnnnnnnnnnnnnnnnnnnnnnnnnnnnnnnnnnnnnnnnnnnnnnnnnnnnnnnnnnnnnnnnnnnnnnnnnnnnnnnnnnnnnnnnnnnnnnnnnnnnnnnnnnnnnnnnnnnnnnnnnnnnnnnnnnnnnnnnnnnnnnnnnnnnnnnnnnnnnnnnnnnnnnnnnnnnnnnnnnnnnnnnnnnnnnnnnnnnnnnnnnnnnnnnnnnnnnnnnnnnnnnnnnnnnnnnnnnnnnnnnnnnnnnnnnnnnnnnnnnnnnnnnnnnnnnnnnnnnnnnnnnnnnnnnnnnnnnnnnnnnnnnnnnnnnnnnnnnnnnnnnnnnnnnnnnnnnnnnnnnnnnnnnnnnnnnnnnnnnnnnnnnnnnnnnnnnnnnnnnnnnnnnnnnnnnnnnnnnnnnnnnnnnnnnnnnnnnnnnnnnnnnnnnnnnnnnnnnnnnnnnnnnnnnnnnnnnnnnnnnnnnnnnnnnnnnnnnnnnnnnnnnnnnnnnnnnnnnnnnnnnnnnnnnnnnnnnnnnnnnnnnnnnnnnnnnnnnnnnnnnnnnnnnnnnnnnnnnnnnnnnnnnnnnnnnnnnnnnnnnnnnnnnnnnnnnnnnnnnnnnnnnnnnnnnnnnnnnnnnnnnnnnnnnnnnnnnnnnnnnnnnnnnnnnnnnnnnnnnnnnnnnnnnnnnnnnnnnnnnnnnnnnnnnnnnnnnnnnnnnnnnnnnnnnnnnnnnnnnnnnnnnnnnnnnnnnnnnnnnnnnnnnnnnnnnnnnnnnnnnnnnnnnnnnnnnnnnnnnnnnnnnnnnnnnnnnnnnnnnnnnnnnnnnnnnnnnnnnnnnnnnnnnnnnnnnnnnnnnnnnnnnnnnnnnnnnnnnnnnnnnnnnnnnnnnnnnnnnnnnnnnnnnnnnnnnnnnnnnnnnnnnnnnnnnnnnnnnnnnnnnnnnnnnnnnnnnnnnnnnnnnnnnnnnnnnnnnnnnnnnnnnnnnnnnnnnnnnnnnnnnnnnnnnnnnnnnnnnnnnnnnnnnnnnnnnnnnnnnnnnnnnnnnnnnnnnnnnnnnnnnnnnnnnnnnnnnnnnnnnnnnnnnnnnnnnnnnnnnnnnnnnnnnnnnnnnnnnnnnnnnnnnnnnnnnnnnnnnnnnnnnnnnnnnnnnnnnnnnnnnnnnnnnnnnnnnnnnnnnnnnnnnnnnnnnnnnnnnnnnnnnnnnnnnnnnnnnnnnnnnnnnnnnnnnnnnnnnnnnnnnnnnnnnnnnnnnnnnnnnnnnnnnnnnnnnnnnnnnnnnnnnnnnnnnnnnnnnnnnnnnnnnnnnnnnnnnnnnnnnnnnnnnnnnnnnnnnnnnnnnnnnnnnnnnnnnnnnnnnnnnnnnnnnnnnnnnnnnnnnnnnnnnnnnnnnnnnnnnnnnnnnnnnnnnnnnnnnnnnnnnnnnnnnnnnnnnnnnnnnnnnnnnnnnnnnnnnnnnnnnnnnnnnnnnnnnnnnnnnnnnnnnnnnnnnnnnnnnnnnnnnnnnnnnnnnnnnnnnnnnnnnnnnnnnnnnnnnnnnnnnnnnnnnnnnnnnnnnnnnnnnnnnnnnnnnnnnnnnnnnnnnnnnnnnnnnnnnnnnnnnnnnnnnnnnnnnnnnnnnnnnnnnnnnnnnnnnnnnnnnnnnnnnnnnnnnnnnnnnnnnnnnnnnnnnnnnnnnnnnnnnnnnnnnnnnnnnnnnnnnnnnnnnnnnnnnnnnnnnnnnnnnnnnnnnnnnnnnnnnnnnnnnnnnnnnnnnnnnnnnnnnnnnnnnnnnnnnnnnnnnnnnnnnnnnnnnnnnnnnnnnnnnnnnnnnnnnnnnnnnnnnnnnnnnnnnnnnnnnnnnnnnnnnnnnnnnnnnnnnnnnnnnnnnnnnnnnnnnnnnnnnnnnnnnnnnnnnnnnnnnnnnnnnnnnnnnnnnnnnnnnnnnnnnnnnnnnnnnnnnnnnnnnnnnnnnnnnnnnnnnnnnnnnnnnnnnnnnnnnnnnnnnnnnnnnnnnnnnnnnnnnnnnnnnnnnnnnnnnnnnnnnnnnnnnnnnnnnnnnnnnnnnnnnnnnnnnnnnnnnnnnnnnnnnnnnnnnnnnnnnnnnnnnnnnnnnnnnnnnnnnnnnnnnnnnnnnnnnnnnnnnnnnnnnnnnnnnnnnnnnnnnnnnnnnnnnnnnnnnnnnnnnnnnnnnnnnnnnnnnnnnnnnnnnnnnnnnnnnnnnnnnnnnnnnnnnnnnnnnnnnnnnnnnnnnnnnnnnnnnnnnnnnnnnnnnnnnnnnnnnnnnnnnnnnnnnnnnnnnnnnnnnnnnnnnnnnnnnnnnnnnnnnnnnnnnnnnnnnnnnnnnnnnnnnnnnnnnnnnnnnnnnnnnnnnnnnnnnnnnnnnnnnnnnnnnnnnnnnnnnnnnnnnnnnnnnnnnnnnnnnnnnnnnnnnnnnnnnnnnnnnnnnnnnnnnnnnnnnnnnnnnnnnnnnnnnnnnnnnnnnnnnnnnnnnnnnnnnnnnnnnnnnnnnnnnnnnnnnnnnnnnnnnnnnnnnnnnnnnnnnnnnnnnnnnnnnnnnnnnnnnnnnnnnnnnnnnnnnnnnnnnnnnnnnnnnnnnnnnnnnnnnnnnnnnnnnnnnnnnnnnnnnnnnnnnnnnnnnnnnnnnnnnnnnnnnnnnnnnnnnnnnnnnnnnnnnnnnnnnnnnnnnnnnnnnnnnnnnnnnnnnnnnnnnnnnnnnnnnnnnnnnnnnnnnnnnnnnnnnnnnnnnnnnnnnnnnnnnnnnnnnnnnnnnnnnnnnnnnnnnnnnnnnnnnnnnnnnnnnnnnnnnnnnnnnnnnnnnnnnnnnnnnnnnnnnnnnnnnnnnnnnnnnnnnnnnnnnnnnnnnnnnnnnnnnnnnnnnnnnnnnnnnnnnnnnnnnnnnnnnnnnnnnnnnnnnnnnnnnnnnnnnnnnnnnnnnnnnnnnnnnnnnnnnnnnnnnnnnnnnnnnnnnnnnnnnnnnnnnnnnnnnnnnnnnnnnnnnnnnnnnnnnnnnnnnnnnnnnnnnnnnnnnnnnnnnnnnnnnnnnnnnnnnnnnnnnnnnnnnnnnnnnnnnnnnnnnnnnnnnnnnnnnnnnnnnnnnnnnnnnnnnnnnnnnnnnnnnnnnnnnnnnnnnnnnnnnnnnnnnnnnnnnnnnnnnnnnnnnnnnnnnnnnnnnnnnnnnnnnnnnnnnnnnnnnnnnnnnnnnnnnnnnnnnnnnnnnnnnnnnnnnnnnnnnnnnnnnnnnnnnnnnnnnnnnnnnnnnnnnnnnnnnnnnnnnnnnnnnnnnnnnnnnnnnnnnnnnnnnnnnnnnnnnnnnnnnnnnnnnnnnnnnnnnnnnnnnnnnnnnnnnnnnnnnnnnnnnnnnnnnnnnnnnnnnnnnnnnnnnnnnnnnnnnnnnnnnnnnnnnnnnnnnnnnnnnnnnnnnnnnnnnnnnnnnnnnnnnnnnnnnnnnnnnnnnnnnnnnnnnnnnnnnnnnnnnnnnnnnnnnnnnnnnnnnnnnnnnnnnnnnnnnnnnnnnnnnnnnnnnnnnnnnnnnnnnnnnnnnnnnnnnnnnnnnnnnnnnnnnnnnnnnnnnnnnnnnnnnnnnnnnnnnnnnnnnnnnnnnnnnnnnnnnnnnnnnnnnnnnnnnnnnnnnnnnnnnnnnnnnnnnnnnnnnnnnnnnnnnnnnnnnnnnnnnnnnnnnnnnnnnnnnnnnnnnnnnnnnnnnnnnnnnnnnnnnnnnnnnnnnnnnnnnnnnnnnnnnnnnnnnnnnnnnnnnnnnnnnnnnnnnnnnnnnnnnnnnnnnnnnnnnnnnnnnnnnnnnnnnnnnnnnnnnnnnnnnnnnnnnnnnnnnnnnnnnnnnnnnnnnnnnnnnnnnnnnnnnnnnnnnnnnnnnnnnnnnnnnnnnnnnnnnnnnnnnnnnnnnnnnnnnnnnnnnnnnnnnnnnnnnnnnnnnnnnnnnnnnnnnnnnnnnnnnnnnnnnnnnnnnnnnnnnnnnnnnnnnnnnnnnnnnnnnnnnnnnnnnnnnnnnnnnnnnnnnnnnnnnnnnnnnnnnnnnnnnnnnnnnnnnnnnnnnnnnnnnnnnnnnnnnnnnnnnnnnnnnnnnnnnnnnnnnnnnnnnnnnnnnnnnnnnnnnnnnnnnnnnnnnnnnnnnnnnnnnnnnnnnnnnnnnnnnnnnnnnnnnnnnnnnnnnnnnnnnnnnnnnnnnnnnnnnnnnnnnnnnnnnnnnnnnnnnnnnnnnnnnnnnnnnnnnnnnnnnnnnnnnnnnnnnnnnnnnnnnnnnnnnnnnnnnnnnnnnnnnnnnnnnnnnnnnnnnnnnnnnnnnnnnnnnnnnnnnnnnnnnnnnnnnnnnnnnnnnnnnnnnnnnnnnnnnnnnnnnnnnnnnnnnnnnnnnnnnnnnnnnnnnnnnnnnnnnnnnnnnnnnnnnnnnnnnnnnnnnnnnnnnnnnnnnnnnnnnnnnnnnnnnnnnnnnnnnnnnnnnnnnnnnnnnnnnnnnnnnnnnnnnnnnnnnnnnnnnnnnnnnnnnnnnnnnnnnnnnnnnnnnnnnnnnnnnnnnnnnnnnnnnnnnnnnnnnnnnnnnnnnnnnnnnnnnnnnnnnnnnnnnnnnnnnnnnnnnnnnnnnnnnnnnnnnnnnnnnnnnnnnnnnnnnnnnnnnnnnnnnnnnnnnnnnnnnnnnnnnnnnnnnnnnnnnnnnnnnnnnnnnnnnnnnnnnnnnnnnnnnnnnnnnnnnnnnnnnnnnnnnnnnnnnnnnnnnnnnnnnnnnnnnnnnnnnnnnnnnnnnnnnnnnnnnnnnnnnnnnnnnnnnnnnnnnnnnnnnnnnnnnnnnnnnnnnnnnnnnnnnnnnnnnnnnnnnnnnnnnnnnnnnnnnnnnnnnnnnnnnnnnnnnnnnnnnnnnnnnnnnnnnnnnnnnnnnngtaactactttccatgaggagggggcatggaatacatatatatgatgttcggctgcatggtgtggaggcgtgcctcaacttcccattcgggatgacacccgtctagcttgagccattgccgacaggagtggttagcgcgactgtggctagggaggaccaggcagtgaggaagctcctcgcggcaagggccaccgatgaggagtacatggcggacctctaccgtctgtacccagagtttgtggataaagagccgcagcgattcgccaacgaggcggtggacagggcggtggagagatcggtgtcaaagaatggcacatcatattccccaacatcgcctacaatggcactgggccggaccccaagatcgttggcatgatgcagacccaatggataagaataagtagaagctatgtctagatccaaattttaaattaggtagaatctatgtcaagtctgagccgaagtttaaattaagtagaatctatgttcaagttatgcaaatttttgctgggtatatgttgaattttggtggttttaattgaaactatgttgaattttgttaacttttgttttatatactccgttttatataagggatcggttannnnnnnnnnnnnnnnnnnnnnnnnnnnnnnnnnnnnnnnnnnnnnnnnnnnnnnnnnnnnnnnnnnnnnnnnnnnnnnnnnnnnnnnnnnnnnnnnnnnnnnnnnnnnnnnnnnnnnnnnnnnnnnnnnnnnnnnnnnnnnnnnnnnnnnnnnnnnnnnnnnnnnnnnnnnnnnnnnnnnnnnnnnnnnnnnnnnnnnnnnnnnnnnnnnnnnnnnnnnnnnnnnnnnnnnnnnnnnnnnnnnnnnnnnnnnnnnnnnnnnnnnnnnnnnnnnnnnnnnnnnnnnnnnnnnnnnnnnnnnnnnnnnnnnnnnnnnnnnnnnnnnnnnnnnnnnnnnnnnnnnnnnnnnnnnnnnnnnnnnnnnnnnnnnnnnnnnnnnnnnnnnnnnnnnnnnnnnnnnnnnnnnnnnnnnnnnnnnnnnnnnnnnnnnnnnnnnnnnnnnnnnnnnnnnnnnnnnnnnnnnnnnnnnnnnnnnnnnnnnnnnnnnnnnnnnnnnnnnnnnnnnnnnnnnnnnnnnnnnnnnnnnnnnnnnnnnnnnnnnnnnnnnnnnnnnnnnnnnnnnnnnnnnnnnnnnnnnnnnnnnnnnnnnnnnnnnnnnnnnnnnnnnnnnnnnnnnnnnnnnnnnnnnnnnnnnnnnnnnnnnnnnnnnnnnnnnnnnnnnnnnnnnnnnnnnnnnnnnnnnnnnnnnnnnnnnnnnnnnnnnnnnnnnnnnnnnnnnnnnnnnnnnnnnnnnnnnnnnnnnnnnnnnnnnnnnnnnnnnnnnnnnnnnnnnnnnnnnnnnnnnnnnnnnnnnnnnnnnnnnnnnnnnnnnnnnnnnnnnnnnnnnnnnnnnnnnnnnnnnnnnnnnnnnnnnnnnnnnnnnnnnnnnnnnnnnnnnnnnnnnnnnnnnnnnnnnnnnnnnnnnnnnnnnnnnnnnnnnnnnnnnnnnnnnnnnnnnnnnnnnnnnnnnnnnnnnnnnnnnnnnnnnnnnnnnnnnnnnnnnnnnnnnnnnnnnnnnnnnnnnnnnnnnnnnnnnnnnnnnnnnnnnnnnnnnnnnnnnnnnnnnnnnnnnnnnnnnnnnnnnnnnnnnnnnnnnnnnnnnnnnnnnnnnnnnnnnnnnnnnnnnnnnnnnnnnnnnnnnnnnnnnnnnnnnnnnnnnnnnnnnnnnnnnnnnnnnnnnnnnnnnnnnnnnnnnnnnnnnnnnnnnnnnnnnnnnnnnnnnnnnnnnnnnnnnnnnnnnnnnnnnnnnnnnnnnnnnnnnnnnnnnnnnnnnnnnnnnnnnnnnnnnnnnnnnnnnnnnnnnnnnnnnnnnnnnnnnnnnnnnnnnnnnnnnnnnnnnnnnnnnnnnnnnnnnnnnnnnnnnnnnnnnnnnnnnnnnnnnnnnnnnnnnnnnnnnnnnnnnnnnnnnnnnnnnnnnnnnnnnnnnnnnnnnnnnnnnnnnnnnnnnnnnnnnnnnnnnnnnnnnnnnnnnnnnnnnnnnnnnnnnnnnnnnnnnnnnnnnnnnnnnnnnnnnnnnnnnnnnnnnnnnnnnnnnnnnnnnnnnnnnnnnnnnnnnnnnnnnnnnnnnnnnnnnnnnnnnnnnnnnnnnnnnnnnnnnnnnnnnnnnnnnnnnnnnnnnnnnnnnnnnnnnnnnnnnnnnnnnnnnnnnnnnnnnnnnnnnnnnnnnnnnnnnnnnnnnnnnnnnnnnnnnnnnnnnnnnnnnnnnnnnnnnnnnnnnnnnnnnnnnnnnnnnnnnnnnnnnnnnnnnnnnnnnnnnnnnnnnnnnnnnnnnnnnnnnnnnnnnnnnnnnnnnnnnnnnnnnnnnnnnnnnnnnnnnnnnnnnnnnnnnnnnnnnnnnnnnnnnnnnnnnnnnnnnnnnnnnnnnnnnnnnnnnnnnnnnnnnnnnnnnnnnnnnnnnnnnnnnnnnnnnnnnnnnnnnnnnnnnnnnnnnnnnnnnnnnnnnnnnnnnnnnnnnnnnnnnnnnnnnnnnnnnnnnnnnnnnnnnnnnnnnnnnnnnnnnnnnnnnnnnnnnnnnnnnnnnnnnnnnnnnnnnnnnnnnnnnnnnnnnnnnnnnnnnnnnnnnnnnnnnnnnnnnnnnnnnnnnnnnnnnnnnnnnnnnnnnnnnnnnnnnnnnnnnnnnnnnnnnnnnnnnnnnnnnnnnnnnnnnnnnnnnnnnnnnnnnnnnnnnnnnnnnnnnnnnnnnnnnnnnnnnnnnnnnnnnnnnnnnnnnnnnnnnnnnnnnnnnnnnnnnnnnnnnnnnnnnnnnnnnnnnnnnnnnnnnnnnnnnnnnnnnnnnnnnnnnnnnnnnnnnnnnnnnnnnnnnnnnnnnnnnnnnnnnnnnnnnnnnnnnnnnnnnnnnnnnnnnnnnnnnnnnnnnnnnnnnnnnnnnnnnnnnnnnnnnnnnnnnnnnnnnnnnnnnnnnnnnnnnnnnnnnnnnnnnnnnnnnnnnnnnnnnnnnnnnnnnnnnnnnnnnnnnnnnnnnnnnnnnnnnnnnnnnnnnnnnnnnnnnnnnnnnnnnnnnnnnnnnnnnnnnnnnnnnnnnnnnnnnnnnnnnnnnnnnnnnnnnnnnnnnnnnnnnnnnnnnnnnnnnnnnnnnnnnnnnnnnnnnnnnnnnnnnnnnnnnnnnnnnnnnnnnnnnnnnnnnnnnnnnnnnnnnnnnnnnnnnnnnnnnnnnnnnnnnnnnnnnnnnnnnnnnnnnnnnnnnnnnnnnnnnnnnnnnnnnnnnnnnnnnnnnnnnnnnnnnnnnnnnnnnnnnnnnnnnnnnnnnnnnnnnnnnnnnnnnnnnnnnnnnnnnnnnnnnnnnnnnnnnnnnnnnnnnnnnnnnnnnnnnnnnnnnnnnnnnnnnnnnnnnnnnnnnnnnnnnnnnnnnnnnnnnnnnnnnnnnnnnnnnnnnnnnnnnnnnnnnnnnnnnnnnnnnnnnnnnnnnnnnnnnnnnnnnnnnnnnnnnnnnnnnnnnnnnnnnnnnnnnnnnnnnnnnnnnnnnnnnnnnnnnnnnnnnnnnnnnnnnnnnnnnnnnnnnnnnnnnnnnnnnnnnnnnnnnnnnnnnnnnnnnnnnnnnnnnnnnnnnnnnnnnnnnnnnnnnnnnnnnnnnnnnnnnnnnnnnnnnnnnnnnnnnnnnnnnnnnnnnnnnnnnnnnnnnnnnnnnnnnnnnnnnnnnnnnnnnnnnnnnnnnnnnnnnnnnnnnnnnnnntgaataatnnnnnnnnnnnnnnnnnnnnnnnnnnnnnnnnnnnnnnnnnnnnnnnnnnnnnnnnnnnnnnnnnnnnnnnnnnnnnnnnnnnnnnnnnnnnnnnnnnnnnnnnnnnnnnnnnnnnnnnnnnnnnnnnnnnnnnnnnnnnncnnnnnnnnnnnnnnnnnnnnnnnnnnnnnnnnnnnnnnnnnnnnnnnnnnnnnnnnnnnnnnnnnnnnnnnnnnnnnnnnnnnnnnnnnnnnnnnnnnnnnnnnnnnnnnnnnnnnnnnnnnnnnnnnnnnnnnnnnnnnnnnnnnnnnnnnnnnnnnnnnnnnnnnnnnnnnnnnnnnnnnnnnnnnnnnnnnnnnnnnnnnnnnnnnnnnnnnnnnnnnnnnnnnnnnnnnnnnnnnnnnnnnnnnnnnnnnnnnnnnnnnnnnnnnnnnnnnnnnnnnnnnnnnnnnnnnnnnnnnnnnnnnnnnnnnnnnnnnnnnnnnnnnnnnnnnnnnnnnnnnnnnnnnnnnnnnnnnnnnnnnttatgtccatttcatttatcctttttgttctggcttctaagaaatgcacgatgtgatttgtttgggccatatccttcttagagcccaaatattgtttggtccagtagaatatttggtctttttaattcacatattccaatttgtacacatttaaaaatcaaacaatcagtaattctattattaaatgatcaaatccagaactcatatgatcaacattcacaaaaacatacaagactgcacgtccgcggtaacatagcttgaacaagcctgattacagtttatatccaagaagtgtacgtgcaatccaaaacatggtggcaaatatcaaccgaaactatggttcacacccttgcttggctctttgctgtcaaagtatatagtcgtccttggaccttgggagctaccaccaacagcacggttgtcctggttgtacttctgtggtcaaagtcctcacctggaaaggattatacaactcatttatatattcacaactcaaaactcatgacatgacatgacactaagagagaacatcatagagactcaaccagatcctgatataaaggctattcagaccatagctaatttggccatcttgcggaactcctaatataaaggctattcagaccatagagactcaaccagatcctaatacaactcatttatataaagactctggagttaatacctgactcttgacagacttggccatcttgcggaactccttgcgcatcagagtcttgtgctggagcttggcaggggtgttctgcttcttggtcttggtcgtggacaggacaactgccttgtcctctcccgctgatggctggaccgccacggtcttgctgttcgccaagcctgaaaccacatcagccccacagcaagttagctccttgcagagacacttgcaaaccaaagggttaaaaatactgcaaagagctacggactcgagaacttgtaggagtggacattgtagaggttgttgggctccttgctgaaccgcaccttggcgttgctgttaccgaactgttttatcaagaagcagttgttcttcttcacgagctcccagaccagagaccctggaatggtagtcatttcccttggactacatcaccaaaacaacaaccaaaagtcagatcctatagctagcaacaagcaacaggacacactaatccaacagaatcagggaaacatttgactatttgagcaaaattttatgttgattgcaagtagaaacaagtacagagcatcaccgggatcaaaatctagcaatattgggccaacgataatgtactaataaaatccaagagggcatgcaatcaattcatatatgttcatggcaaacattattagaaatcccagtttcatgcttaacaagccatcattcgtccgggatgctagcaagaacaagtgaccgggatgcaactgttgttcctccacactcctaagaggctcatttttgtcccgtcgtccatcaaaccagactgcatacatgtgcagaaaacaagtgtatgaaaagatggatgcaactggtgccccccccccctctcttaacagggagcaagatgagcatatctgagatcaaccattaacagattgtagtgctaaatctcagaaatctaatttaccagatgtagcagagacctttgggagtgcatttgtacaaaattgaactattttcagtcattcagtgcaagcattcagcctatgaactaatcaatcagaatgcatccagtgaacactaccaagatctctgctatcgatgaaatcagctcacacattcactatagtcaatctaaaacgaaccactctcggttggatagttcagccataagcagagacagctattgaagtacccaccttgaagacgaggcccgtgagcgcggcgaaggtggcctctccctctctggtctctccccaccccccaaatccagtagcagcgggagcatgcccacggcgacgacaaacacatgccccagcgcacgagctactcccttggaaaccaaacgcgtcagcaaagggaatggaagagatggggagaagatgggcgagatagtggctaccttgacgtgggagcagctgcgatgtggcgtctctagcactcccatggcgtccgagcagaagcagacgtaggaagacggaccccgcctcgatctggaccctgtgccggcgccgctccgcctcctccgttgggtgtagtcgcagcagcacctcgcgggcggccgcctccgcgggccgcagcgccggcgggatggtcgggggccgcggacacagcgccatcagcatcatcccgcgcggctgcttgtccgggacccagccgaggccagcaggtggctcaggcccacaccgtggggttgggggaagccatggcgccgccgcccccctgttcgagttgctgatggaggggccaggccggtgccggatccagcacccactggcctcgatgttgtcggatgtggcagaccgagggcgaggggagaggtgggtggagagggaggcggcgacgaggggggtctggatcgagagcggagtggcagcgcggaagggaggcggctgtggaaggagtgcggcgtcgccatcgattcgatctgaatcgggggagtgggcgctgttagggtttgggcggccggcgaggttggtcgaggactagggggcgaggggagagtgagggcggcggtgcggtgggtggcggcatgggtcatcgacggtgagggtggagcggcggctgcggaggaggaatctggatcggggagagggaggcggcagatcggggagagggaggcggggacggtgacggtggacctagggtttctcgggaaggagggggtcgagggagtaaggnnnnnnnnnnnnnnnnnnnnnnnnnnnnnnnnnnnnnnnnnnnnnnnnnnnnnnnnnnnnnnnnnnnnnnnnnnnnnnnnnnnnnnnnnnnnnnnnnnnnnnnnnnnnnnnnnnnnnnnnnnnnnnnnnnnnnnnnnnnnnnnnnnnnnnnnnnnnnnnnnnnnnnnnnnnnnnnnnnnnnnnnnnnnnnnnnnnnnnnnnnnnnnnnnnnnnnnnnnnnnnnnnnnnnnnnnnnnnnnnnnnnnnnnnnnnnnnnnnnnnnnnnnnnnnnnnnnnnnnnnnnnnnnnnnnnnnnnnnnnnnnnnnnnnnnnnnnnnnnnnnnnnnnnnnnnnnnnnnnnnnnnnnnnnnnnnnnnnnnnnnnnnnnnnnnnnnnnnnnnnnnnnnnnnnnnnnnnnnnnnnnnnnnnnnnnnnnnnnnnnnnnnnnnnnnnnnnnnnnnnnnnnnnnnnnnnnnnnnnnnnnnnnnnnnnnnnnnnnnnnnnnnnnnnnnnnnnnnnnnnnctacgaggannnnnnnnnnnnnnnnnnnnnnnnnnnnnnnnnnnnnnnnnnnnnnnnnnnnnnnnnnnnnnnnnnnnnnnnnnnnnnnnnnnnnnnnnnnnnnnnnnnnnnnnnnnnnnnnnnnnnnnnnnnnnnnnnnnnnnnnnnnnnnnnnnnnnnnnnnnnnnnnnnnnnnnnnnnnnnnnnnnnnnnnnnnnnnnnnnnnnnnnnnnnnnnnnnnnnnnnnnnnnnnnnnnnnnnnnnnnnnnnnnnnnnnnnnnnnnnnnnnnnnnnnnnnnnnnnnnnnnnnnnnnnnnnnnnnnnnnnnnnnnnnnnnnnnnnnnnnnnnnnnnnnnnnnnnnnnnnnnnnnnnnnnnnnnnnnnnnnnnnnnnnnnnnnnnnnnnnnnnnnnnnnnnnnnnnnnnnnnnnnnnnnnnnnnnnnnnnnnnnnnnnnnnnnnnnnnnnnnnnnnnnnnnnnnnnnnnnnnnnnnnnnnnnnnnnnnnnnnnnnnnnnnnnnnnnnnnnnnnnnnnnnnnnnnnnnnnnnnnnnnnnnnnnnnnnnnnnnnnnnnnnnnnnnnnnnnnnnnnnnnnnnnnnnnnnnnnnnnnnnnnnnnnnnnnnnnnnnnnnnnnnnnnnnnnnnnnnnnnnnnnnnnnnnnnnnnnnnnnnnnnnnnnnnnnnnnnnnnnnnnnnnnnnnnnnnnnnnnnnnnnnnnnnnnnnnnnnnnnnnnnnnnnnnnnnnnnnnnnnnnnnnnnnnnnnnnnnnnnnnnnnnnnnnnnnnnnnnnnnnnnnnnnnnnnnnnnnnnnnnnnnnnnnnnnnnnnnnnnnnnnnnnnnnnnnnnnnnnnnnnnnnnnnnnnnnnnnnnnnnnnnnnnnnnnnnnnnnnnnnnnnnnnnnnnnnnnnnnnnnnnnnnnnnnnnnnnnnnnnnnnnnnnnnnnnnnnnnnnnnnnnnnnnnnnnnnnnnnnnnnnnnnnnnnnnnnnnnnnnnnnnnnnnnnnnnnnnnnnnnnnnnnnnnnnnnnnnnnnnnnnnnnnnnnnnnnnnnnnnnnnnnnnnnnnnnnnnnnnnnnnnnnnnnnnnnnnnnnnnnnnnnnnnnnnnnnnnnnnnnnnnnnnnnnnnnnnnnnnnnnnnnnnnnnnnnnnnnnnnnnnnnnnnnnnnnnnnnnnnnnnnnnnnnnnnnnnnnnnnnnnnnnnnnnnnnnnnnnnnnnnnnnnnnnnnnnnnnnnnnnnnnnnnnnnnnnnnnnnnnnnnnnnnnnnnnnnnnnnnnnnnnnnnnnnnnnnnnnnnnnnnnnnnnnnnnnnnnnnnnnnnnnnnnnnnnnnnnnnnnnnnnnnnnnnnnnnnnnnnnnnnnnnnnnnnnnnnnnnnnnnnnnnnnnnnnnnnnnnnnnnnnnnnnnnnnnnnnnnnnnnnnnnnnnnnnnnnnnnnnnnnnnnnnnnnnnnnnnnnnnnnnnnnnnnnnnnnnnnnnnnnnnnnnnnnnnnnnnnnnnnnnnnnnnnnnnnnnnnnnnnnnnnnnnnnnnnnnnnnnnnnnnnnnnnnnnnnnnnnnnnnnnnnnnnnnnnnnnnnnnnnnnnnnnnnnnnnnnnnnnnnnnnnnnnnnnnnnnnnnnnnnnnnnnnnnnnnnnnnnnnnnnnnnnnnnnnnnnnnnnnnnnnnnnnnnnnnnnnnnnnnnnnnnnnnnnnnnnnnnnnnnnnnnnnnnnnnnnnnnnnnnnnnnnnnnnnnnnnnnnnnnnnnnnnnnnnnnnnnnnnnnnnnnnnnnnnnnnnnnnnnnnnnnnnnnnnnnnnnnnnnnnnnnnnnnnnnnnnnnnnnnnnnnnnnnnnnnnnnnnnnnnnnnnnnnnnnnnnnnnnnnnnnnnnnnnnnnnnnnnnnnnnnnnnnnnnnnnnnnnnnnnnnnnnnnnnnnnnnnnnnnnnnnnnnnnnnnnnnnnnnnnnnnnnnnnnnnnnnnnnnnnnnnnnnnnnnnnnnnnnnnnnnnnnnnnnnnnnnnnnnnnnnnnnnnnnnnnnnnnnnnnnnnnnnnnnnnnnnnnnnnnnnnnnnnnnnnnnnnnnnnnnnnnnnnnnnnnnnnnnnnnnnnnnnnnnnnnnnnnnnnnnnnnnnnnnnnnnnnnnnnnnnnnnnnnnnnnnnnnnnnnnnnnnnnnnnnnnnnnnnnnnnnnnnnnnnnnnnnnnnnnnnnnnnnnnnnnnnnnnnnnnnnnnnnnnnnnnnnnnnnnnnnnnnnnnnnnnnnnnnnnnnnnnnnnnnnnnnnnnnnnnnnnnnnnnnnnnnnnnnnnnnnnnnnnnnnnnnnnnnnnnnnnnnnnnnnnnnnnnnnnnnnnnnnnnnnnnnnnnnnnnnnnnnnnnnnnnnnnnnnnnnnnnnnnnnnnnnnnnnnnnnnnnnnnnnnnnnnnnnnnnnnnnnnnnnnnnnnnnnnnnnnnnnnnnnnnnnnnnnnnnnnnnnnnnnnnnnnnnnnnnnnnnnnnnnnnnnnnnnnnnnnnnnnnnnnnnnnnnnnnnnnnnnnnnnnnnnnnnnnnnnnnnnnnnnnnnnnnnnnnnnnnnnnnnnnnnnnnnnnnnnnnnnnnnnnnnnnnnnnnnnnnnnnnnnnnnnnnnnnnnnnnnnnnnnnnnnnnnnnnnnnnnnnnnnnnnnnnnnnnnnnnnnnnnnnnnnnnnnnnnnnnnnnnnnnnnnnnnnnnnnnnnnnnnnnnnnnnnnnnnnnnnnnnnnnnnnnnnnnnnnnnnnnnnnnnctaggccggtttaataaacaccggataatttatcatcatnnnnnnnnnnnnnnnnnnnnnnnnnnnnnnnnnnnnnnnnnnnnnnnnnnnnnnnnnnnnnnnnnnnnnnnnnnnnnnnnnnnnnnnnnnnnnnnnnnnnnnnnnnnnnnnnnnnnnnnnnnnnnnnnnnnnnnnnnnnnnnnnnnnnnnnnnnnnnnnnnnnnnnnnnnnnnnnnnnnnnnnnnnnnnnnnnnnnnnnnnnnnnnnnnnnnnnnnnnnnnnnnnnnnnnnnnnnnnnnnnnnnnnnnnnnnnnnnnnnnnnnnnnnnnnnnnnnnnnnnnnnnnnnnnnnnnnnnnnnnnnnnnnnnnnnnnnnnnnnnnnnnnnnnnnnnnnnnnnnnnnnnnnnnnnnnnnnnnnnnnnnnnnnnnnnnnnnnnnnnnnnnnnnnnnnnnnnnnnnnnnnnnnnnnnnnnnnnnnnnnnnnnnnnnnnnnnnnnnnnnnnnnnnnnnnnnnnnnnnnnnnnnnnnnnnnnnnnnnnnnnnnnnnnnnnnnntgtcggtttnnnnnnnnnnnnnnnnnnnnnnnnnnnnnnnnnnnnnnnnnnnnnnnnnnnnnnnnnnnnnnnnnnnnnnnnnnnnnnnnnnnnnnnnnnnnnnnnnnnnnnnnnnnnnnnnnnnnnnnnnnnnnnnnnnnnnnnnnnnnnnnnnnnnnnnnnnnnnnnnnnnnnnnnnnnnnnnnnnnnnnnnnnnnnnnnnnnnnnnnnnnnnnnnnnnnnnnnnnnnnnnnnnnnnnnnnnnnnnnnnnnnnnnnnnnnnnnnnnnnnnnnnnnnnnnnnnnnnnnnnnnnnnnnnnnnnnnnnnnnnnnnnnnnnnnnnnnnnnnnnnnnnnnnnnnnnnnnnnnnnnnnnnnnnnnnnnnnnnnnnnnnnnnnnnnnnnnnnnnnnnnnnnnnnnnnnnnnnnnnnnnnnnnnnnnnnnnnnnnnnnnnnnnnnnnnnnnnnnnnnnnnnnnnnnnnnnnnnnnnnnnnnnnnnnnnnnnnnnnnnnnnnnnnnnnnnnnnnnnnnnnnnnnnnnnnnnnnnnnnnnnnnnnnnnnnnnnnnnnnnnnnnnnnnnnnnnnnnnnnnnnnnnnnnnnnnnnnnnnnnnnnnnnnnnnnnnnnnnnnnnnnnnnnnnnnnnnnnnnnnnnnnnnnnnnnnnnnnnnnnnnnnnnnnnnnnnnnnnnnnnnnnnnnnnnnnnnnnnnnnnnnnnnnnnnnnnnnnnnnnnnnnnnnnnnnnnnnnnnnnnnnnnnnnnnnnnnnnnnnnnnnnnnnnnnnnnnnnnnnnnnnnnnnnnnnnnnnnnnnnnnnnnnnnnnnnnnnnnnnnnnnnnnnnnnnnnnnnnnnnnnnnnnnnnnnnnnnnnnnnnnnnnnnnnnnnnnnnnnnnnnnnnnnnnnnnnnnnnnnnnnnnnnnnnnnnnnnnnnnnnnnnnnnnnnnnnnnnnnnnnnnnnnnnnnnnnnnnnnnnnnnnnnnnnnnnnnnnnnnnnnnnnnnnnnnnnnnnnnnnnnnnnnnnnnnnnnnnnnnnnnnnnnnnnnnnnnnnnnnnnnnnnnnnnnnnnnnnnnnnnnnnnnnnnnnnnnnnnnnnnnnnnnnnnnnnnnnnnnnnnnnnnnnnnnnnnnnnnnnnnnnnnnnnnnnnnnnnnnnnnnnnnnnnnnnnnnnnnnnnnnnnnnnnnnnnnnnnnnnnnnnnnnnnnnnnnnnnnnnnnnnnnnnnnnnnnnnnnnnnnnnnnnnnnnnnnnnnnnnnnnnnnnnnnnnnnnnnnnnnnnnnnnnnnnnnnnnnnnnnnnnnnnnnnnnnnnnnnnnnnnnnnnnnnnnnnnnnnnnnnnnnnnnnnnnnnnnnnnnnnnnnnnnnnnnnnnnnnnnnnnnnnnnnnnnnnnnnnnnnnnnnnnnnnnnnnnnnnnnnnnnnnnnnnnnnnnnnnnnnnnnnnnnnnnnnnnnnnnnnnnnnnnnnnnnnnnnnnnnnnnnnnnnnnnnnnnnnnnnnnnnnnnnnnnnnnnnnnnnnnnnnnnnnnnnnnnnnnnnnnnnnnnnnnnnnnnnnnnnnnnnnnnnnnnnnnnnnnnnnnnnnnnnnnnnnnnnnnnnnnnnnnnnnnnnnnnnnnnnnnnnnnnnnnnnnnnnnnnnnnnnnnnnnnnnnatagataatctgcacgcagactaccagcatcaactgacacatgtaccgcgtgtcctctcctttccaccacacttttgtctggatgtgaagtaacaatagctttttggctccagataatatgtatatagcttcaaagtatgcccgggcttttctctgacaatatgctgaaatatcatgccctgtctctttctgaatataattgttcttctcttctttttgcatgaacagctagtctccttgtcacgtcacttagtttggctcaggcacgaggcggctggcggaggtgactacgacggggacccggcggaagggcccggccatttgtggcaaaaacgaagcggcctgctgtctgcagcatacatgcggctcaaagcgaccacatcagagactggcgtcagcggcgacagctcaccagctcaaggaaggcctctaattgtgcccggcgatttaacagtggcggtttaaacaggtaacaacagagacaaggtggcgatttgctagtgatggcgatttgacggcggacacggccggcagcttagcgttgccatggtggctcagacgggaaggcgacggcggtttgaggtggctgcgggtcgatgatggcgacccagaggaggcgatggcgcgactgaaccggcagcggggtagggccggcccgaggtgatgaatcagggccggcggctcggaagcacatccgtgatggtgaaacggatcggggccgtgcaggtcgagcggagttgcgcagcgtggagtcgcataaggaagaggcggccaacagtggcttacccacagcgctgacggggcgtgcggcagcgcagtccagcataggcgcagcagtagtcagtggcacaatgagccgacgagagacatagcagcaggaggtgaaccggcggaggccagagcggttcacgagagactcgcggcagctcaaggcggttcacgaagcggaaacgggccggcgcccggcactatcgctcagggcatcatgaggaagacagcgcttagctaggtggaaattgcaatatgcagagagaagatcagtccggggtaattttgtacggcggcgagctggcctggcgactcacggcacaggcggtttgaaaacagggacgtgactcggaacagacggccgctcgacgcacgctgaagtgactcggggccagcttgatccgatggcgagtcagagccgaggtgaaggcgcacaggtcagaaaaccgagatggaggcggtttagcggcggcaccgacggctattcatcgcagcggagactcaagcaaagtggagcacggcggtggtgacttgttggtcggggcgcatccaggacggcccggtgccggctcattggcggcgagatgagcagggccggctcgcggggctcaggagccgggtcgcctgagtggaggcacggcacagagggccgcagcgatttgggtgtcgaggcggccggcggctcagaacggcggcggagtagggcgtcgttgagcggcaagggccagccggtgcgcggtggagatgaaggaaagcggcgagctcagaggcgcggttgcgtccatggccgcagcaacagcagtgatgggcagtgccgtcgcggcgacttaacagtgggtggcgactcacgactgaggcaggggtgaggccgaagcaaggggagctgacgaggcggcttgaaggcgccgaggaaaagggggaccggctggagcgcacacatagtggaggagcaaccaagcgcgacagtcggtggcttggattgaaggattctcaacaacggcggccgtagctgagaggcgccggcgacttagagcatggcggctctatgcggagacgatggtgactcggggcggtacacggagatgagccatcgcgtcgcggaggcggcgaagacttggttggacagaaatcccttgatgaagaactcgtcgtatccgtcgaaacctccaccgtgacggcgcctaactcgccgaaggccaggtcagcgatgaactcggccgggttaccacctgctccgccccgtcgtccttttgccaaaccaccatccgccaggcttcaacaccagccgtgacgtcttgctttcctcgggaaatcctgaatcatgctgttcatacgtgagctctccatgcttcagctcaacacaatgatagttggttcaataatctgtccttcatgtcaggcacgtccggcttgttgcgatgtgaacaacgacaactgactttgatcatgacttttggctatggggcaccccagatttgcccagtaatgccttgtaaaataattcttaatccgaacaggttttttctggaagcttgtgcctgtgtgtagcgatgtgctggcctgggcggattgcttatttcctttgagattgatttgacctcgaagcagggccggtttgtggggttcgggtgaaacaataacccggcagtaatgattagctgctggattgttttctcctccggactcgatgtactttggttacccgtggcgtaacgaaacaaagcaactccannnnnnnnnnnnnnnnnnnnnnnnnnnnnnnnnnnnnnnnnnnnnnnnnnnnnnnnnnnnnnnnnnnnnnnnnnnnnnnnnnnnnnnnnnnnccctagattattgtttagcctttaaacctcatcaatcataaatttggtttcaacgcactttaagcgnnnnnnnnnnnnnnnnnnnnnnnnnnnnnnnnnnnnnnnnnnnnnnnnnnnnnnnnnnnnnnnnnnnnnnnnnnnnnnnnnnnnnnnnnnnnnnnnnnnnnnnnnnnnnnnnnnnnnnnnnnnnnnnnnnnnnnnnnnnnnnnnnnnnnnnnnnnnnnnnnnnnnnnnnnnnnnnnnnnnnnnnnnnnnnnnnnnnnnnnnnnnnnnnnnnnnnnnnnnnnnnnnnnnnnnnnnnnnnnnnnnnnnnnnnnnnnnnnnnnnnnnnnnnnnnnnnnnnnnnnnnnnnnnnnnnnnnnnnnnnnnnnnnnnnnnnnnnnnnnnnnnnnnnnnnnnnnnnnnnnnnnnnnnnnnnnnnnnnnnnnnnnnnnnnnnnnnnnnnnnnnnnnnnnnnnnnnnnnnnnnnnnnnnnnnnnnnnnnnnnnnnnnnnnnnnnnnnnnnnnnnnnnnnnnnnnnnnnnnnnnnnnnnnnnnnnnnnnnnnnnnnnnnnnnnnnnnnnnnnnnnnnnnnnnnnnnnnnnnnnnnnnnnnnnnnnnnnnnnnnnnnnnnnnnnnnnnnnnnnnnnnnnnnnnnnnnnnnnnnnnnnnnnnnnnnnnnnnnnnnnnnnnnnnnnnnnnnnnnnnnnnnnnnnnnnnnnnnnnnnnnnnnnnnnnnnnnnnnnnnnnnnnnnnnnnnnnnnnnnnnnnnnnnnnnnnnnnnnnnnnnnnnnnnnnnnnnnnnnnnnnnnnnnnnnnnnnnnnnnnnnnnnnnnnnnnnnnnnnnnnnaatggtatgacnnnnnnnnnnnnnnnnnnnnnnnnnnnnnnnnnnnnnnnnnnnnnnnnnnnnnnnnnnnnnnnnnnnnnnnnnnnnnnnnnnnnnnnnnnnnnnnnnnnnnnnnnnnnnnnnnnnnnnnnnnnnnnnnnnnnnnnnnnnnnnnnnnnnnnnnnnnnnnnnnnnnnnnnnnnnnnnnnnnnnnnnnnnnnnnnnnnnnnnnnnnnnnnnnnnnnnnnnnnnnnnnnnnnnnnnnnnnnnnnnnnnnnnnnnnnnnnnnnnnnnnnnnnnnnnnnnnnnnnnnnnnnnnnnnnnnnnnnnnnnnnnnnnnnnnnnnnnnnnnnnnnnnnnnnnnnnnnnnnnnnnnnnnnnnnnnnnnnnnnnnnnnnnnnnnnnnnnnnnnnnnnnnnnnnnnnnnnnnnnnnnnnnnnnnnnnnnnnnnnnnnnnnnnnnnnnnnnnnnnnnnnnnnnnnnnnnnnnnnnnnnnnnnnnnnnnnnnnnnnnnnnnnnnnnnnnnnnnnnnnnnnnnnnnnnnnnnnnnnnnnnnnnnnnnnnnnnnnnnnnnnnnnnnnnnnnnnnnnnnnnnnnnnnnnnnnnnnnnnnnnnnnnnnnnnnnnnnnnnnnnnnnnnnnnnnnnnnnnnnnnnnnnnnnnnnnnnnnnnnnnnnnnnnnnnnnnnnnnnnnnnnnnnnnnnnnnnnnnnnnnnnnnnnnnnnnnnnnnnnnnnnnnnnnnnnnnnnnnnnnnnnnnnnnnnnnnnnnnnnnnnnnnnnnnnnnnnnnnnnnnnnnnnnnnnnnnnnnnnnnnnnnnnnnnnnnnnnnnnnnnnnnnnnnnnnnnnnnnnnnnnnnnnnnnnnnnnnnnnnnnnnnnnnnnnnnnnnnnnnnnnnnnnnnnnnnnnnnnnnnnnnnnnnnnnnnnnnnnnnnnnnnnnnnnnnnnnnnnnnnnnnnnnnnnnnnnnnnnnnnnnnnnnnnnnnnnnnnnnnnnnnnnnnnnnnnnnnnnnnnnnnnnnnnnnnnnnnnnnnnnnnnnnnnnnnnnnnnnnnnnnnnnnnnnnnnnnnnnnnnnnnnnnnnnnnnnnnnnnnnnnnnnnnnnnnnnnnnnnnnnnnacatgatgtaaaggtaaagcacgaaaaaacatgaacactgagctatctccagaaatcaccacaacatgctcaaaaggacatggcaaaattgcaaatcgtaacatgctcaaaacgaaataacatcaggttgcaatgtttagagctaccaaacaacatgttacagccagctatcattgcaaaatagagcatgcatgatattaataaaagcacccaacaacacttccttactgaacttattccaaagatcaacataaaacatggtagcatcaatgcaaacatggcaagtgatatgacagattcagacttggagaaaataacagtacatggcagaaacaacgataagtaggcatgttggcatgtgaagtcaaccaacaannnnnnnnnnnnnnnnnnnnnnnnnnnnnnnnnnnnnnnnnnnnnnnnnnnnnnnnnnnnnnnnnnnnnnnnnnnnnnnnnnnnnnnnnnnnnnnnnnnnnnnnnnnnnnnnnnnnnnnnnnnnnnnnnnnnnnnnnnnnnnnnnnnnnnnnnnnnnnnnnnnnnnnnnnnnnnnnnnnnnnnnnnnnnnnnnnnnnnnnnnnnnnnnnnnnnnnnnnnnnnnnnnnnnnnnnnnnnnnnnnnnnnnnnnnnnnnnnnnnnnnnnnnnnnnnnnnnnnnnnnnnnnnnnnnnnnnnnnnnnnnnnnnnnnnnnnnnnnnnnnnnnnnnnnnnnnnnnnnnnnnnnnnnnnnnnnnnnnnnnnnnnnnnnnnnnnnnnnnnnnnnnnnnnnnnnnnnnnnnnnnnnnnnnnnnnnnnnnnnnnnnnnnnnnnnnnnnnnnnnnnnnnnnnnnnnnnnnnnnnnnnnnnnnnnnnnnnnnnnnnnnnnnnnnnnnnnnnnnnnnnnnnnnnnnnnnnnnnnnnnnnnnnnnnnnnnnnnnnnnnnnnnnnnnnnnnnnnnnnnnnnnnnnnnnnnnnnnnnnnnnnnnnnnnnnnnnnnnnnnnnnnnnnnnnnnnnnnnnnnnnnnnnnnnnnnnnnnnnnnnnnnnnnnnnnnnnnnnnnnnnnnnnnnnnnnnnnnnnnnnnnnnnnnnnnnnnnnnnnnnnnnnnnnnnnnnnnnnnnnnnnnnnnnnnnnnnnnnnnnnnnnnnnnnnnnnnnnnnnnnnnnnnnnnnnnnnnnnnnnnnnnnnnnnnnnnnnnnnnnnnnnnnnnnnnnnnnnnnnnnnnnnnnnnnnnnnnnnnnnnnnnnnnnnnnnnnnnnnnnnnnnnnnnnnnnnnnnnnnnnnnnnnnnnnnnnnnnnnnnnnnnnnnnnnnnnnnnnnnnnnnnnnnnnnnnnnnnnnnnnnnnnnnnnnnnnnnnnnnnnnnnnnnnnnnnnnnnnnnnnnnnnnnnnnnnnnnnnnnnnnnnnnnnnnnnnnnnnnnnnnnnnnnnnnnnnnnnnnnnnnnnnnnnnnnnnnnnnnnnnnnnnnnnnnnnnnnnnnnnnnnnnnnnnnnnnnnnnnnnnnnnnnnnnnnnnnnnnnnnnnnnnnnnnnnnnnnnnnnnnnnnnnnnnnnnnnnnnnnnnnnnnnnnnnnnnnnnnnnnnnnnnnnnnnnnnnnnnnnnnnnnnnnnnnnnnnnnnnnnnnnnnnnnnnnnnnnnnnnnnnnnnnnnnnnnnnnnnnnnnnnnnnnnnnnnnnnnnnnnnnnnnnnnnnnnnnnnnnnnnnnnnnnnnnnnnnnnnnnnnnnnnnnnnnnnnnnnnnnnnnnnnnnnnnnnnnnnnnnnnnnnnnnnnnnnnnnnnnnnnnnnnnnnnnnnnnnnnnnnnnnnnnnnnnnnnnnnnnnnnnnnnnnnnnnnnnnnnnnnnnnnnnnnnnnnnnnnnnnnnnnnnnnnnnnnnnnnnnnnnnnnnnnnnnnnnnnnnnnnnnnnnnnnnnnnnnnnnnnnnnnnnnnnnnnnnnnnnnnnnnnnnnnnnnnnnnnnnnnnnnnnnnnnnnnnnnnnnnnnnnnnnnnnnnnnnnnnnnnnnnnnnnnnnnnnnnnnnnnnnnnnnnnnnnnnnnnnnnnnnnnnnnnnnnnnnnnnnnnnnnnnnnnnnnnnnnnnnnnnnnnnnnnnnnnnnnnnnnnnnnnnnnnnnnnnnnnnnnnnnnnnnnnnnnnnnnnnnnnnnnnnnnnnnnnnnnnnnnnnnnnnnnnnnnnnnnnnnnnnnnnnnnnnnnnnnnnnnnnnnnnnnnnnnnnnnnnnnnnnnnnnnnnnnnnnnnnnnnnnnnnnnnnnnnnnnnnnnnnnnnnnnnnnnnnnnnnnnnnnnnnnnnnnnnnnnnnnnnnnnnnnnnnnnnnnnnnnnnnnnnnnnnnnnnnnnnnnnnnnnnnnnnnnnnnnnnnnnnnnnnnnnnnnnnnnnnnnnnnnnnnnnnnnnnnnnnnnnnnnnnnnnnnnnnnnnnnnnnnnnnnnnnnnnnnnnnnnnnnnnnnnnnnnnnnnnnnnnnnnnnnnnnnnnnnnnnnnnnnnnnnnnnnnnnnnnnnnnnnnnnnnnnnnnnnnnnnnnnnnnnnnnnnnnnnnnnnnnnnnnnnnnnnnnnnnnnnnnnnnnnnnnnnnnnnnnnnnnnnnnnnnnnnnnnnnnnnnnnnnnnnnnnnnnnnnnnnnnnnnnnnnnnnnnnnnnnnnnnnnnnnnnnnnnnnnnnnnnnnnnnnnnnnnnnnnnnnnnnnnnnnnnnnnnnnnnnnnnnnnnnnnnnnnnnnnnnnnnnnnnnnnnnnnnnnnnnnnnnnnnnnnnnnnnnnnnnnnnnnnnnnnnnnnnnnnnnnnnnnnnnnnnnnnnnnnnnnnnnnnnnnnnnnnnnnnnnnnnnnnnnnnnnnnnnnnnnnnnnnnnnnnnnnnnnnnnnnnnnnnnnnnnnnnnnnnnnnnnnnnnnnnnnnnnnnnnnnnnnnnnnnnnnnnnnnnnnnnnnnnnnnnnnnnnnnnnnnnnnnnnnnnnnnnnnnnnnnnnnnnnnnnnnnnnnnnnnnnnnnnnnnnnnnnnnnnnnnnnnnnnnnnnnnnnnnnnnnnnnnnnnnnnnnnnnnnnnnnnnnnnnnnnnnnnnnnnnnnnnnnnnnnnnnnnnnnnnnnnnnnnnnnnnnnnnnnnnnnnnnnnnnnnnnnnnnnnnnnnnnnnnnnnnnnnnnnnnnnnnnnnnnnnnnnnnnnnnnnnnnnnnnnnnnnnnnnnnnnnnnnnnnnnnnnnnnnnnnnnnnnnnnnnnnnnnnnnnnnnnnnnnnnnnnnnnnnnnnnnnnnnnnnnnnnnnnnnnnnnnnnnnnnnnnnnnnnnnnnnnnnnnnnnnnnnnnnnnnnnnnnnnnnnnnnnnnnnnnnnnnnnnnnnnnnnnnnnnnnnnnnnnnnnnnnnnnnnnnnnnnnnnnnnnnnnnnnnnnnnnnnnnnnnnnnnnnnnnnnnnnnnnnnnnnnnnnnnnnnnnnnnnnnnnnnnnnnnnnnnnnnnnnnnnnnnnnnnnnnnnnnnnnnnnnnnnnnnnnnnnnnnnnnnnnnnnnnnnnnnnnnnnnnnnnnnnnnnnnnnnnnnnnnnnnnnnnnnnnnnnnnnnnnnnnnnnnnnnnnnnnnnnnnnnnnnnnnnnnnnnnnnnnnnnnnnnnnnnnnnnnnnnnnnnnnnnnnnnnnnnnnnnnnnnnnnnnnnnnnnnnnnnnnnnnnnnnnnnnnnnnnnnnnnnnnnnnnnnnnnnnnnnnnnnnnnnnnnnnnnnnnnnnnnnnnnnnnnnnnnnnnnnnnnnnnnnnnnnnnnnnnnnnnnnnnnnnnnnnnnnnnnnnnnnnnnnnnnnnnnnnnnnnnnnnnnnnnnnnnnnnnnnnnnnnnnnnnnnnnnnnnnnnnnnnnnnnnnnnnnnnnnnnnnnnnnnnnnnnnnnnnnnnnnnnnnnnnnnnnnnnnnnnnnnnnnnnnnnnnnnnnnnnnnnnnnnnnnnnnnnnnnnnnnnnnnnnnnnnnnnnnnnnnnnnnnnnnnnnnnnnnnnnnnnnnnnnnnnnnnnnnnnnnnnnnnnnnnnnnnnnnnnnnnnnnnnnnnnnnnnnnnnnnnnnnnnnnnnnnnnnnnnnnnnnnnnnnnnnnnnnnnnnnnnnnnnnnnnnnnnnnnnnnnnnnnnnnnnnnnnnnnnnnnnnnnnnnnnnnnnnnnnnnnnnnnnnnnnnnnnnnnnnnnnnnnnnnnnnnnnnnnnnnnnnnnnnnnnnnnnnnnnnnnnnnnnnnnnnnnnnnnnnnnnnnnnnnnnnnnnnnnnnnnnnnnnnnnnnnnnnnnnnnnnnnnnnnnnnnnnnnnnnnnnnnnnnnnnnnnnnnnnnnnnnnnnnnnnnnnnnnnnnnnnnnnnnnnnnnnnnnnnnnnnnnnnnnnnnnnnnnnnnnnnnnnnnnnnnnnnnnnnnnnnnnnnnnnnnnnnnnnnnnnnnnnnnnnnnnnnnnnnnnnnnnnnnnnnnnnnnnnnnnnnnnnnnnnnnnnnnnnnnnnnnnnnnnnnnnnnnnnnnnnnnnnnnnnnnnnnnnnnnnnnnnnnnnnnnnnnnnnnnnnnnnnnnnnnnnnnnnnnnnnnnnnnnnnnnnnnnnnnnnnnnnnnnnnnnnnnnnnnnnnnnnnnnnnnnnnnnnnnnnnnnnnnnnnnnnnnnnnnnnnnnnnnnnnnnnnnnnnnnnnnnnnnnnnnnnnnnnnnnnnnnnnnnnnnnnnnnnnnnnnnnnnnnnnnnnnnnnnnnnnnnnnnnnnnnnnnnnnnnnnnnnnnnnnnnnnnnnnnnnnnnnnnnnnnnnnnnnnnnnnnnnnnnnnnnnnnnnnnnnnnnnnnnnnnnnnnnnnnnnnnnnnnnnnnnnnnnnnnnnnnnnnnnnnnnnnnnnnnnnnnnnnnnnnnnnnnnnnnnnnnnnnnnnnnnnnnnnnnnnnnnnnnnnnnnnnnnnnnnnnnnnnnnnnnnnnnnnnnnnnnnnnnnnnnnnnnnnnnnnnnnnnnnnnnnnnnnnnnnnnnnnnnnnnnnnnnnnnnnnnnnnnnnnnnnnnnnnnnnnnnnnnnnnnnnnnnnnnnnnnnnnnnnnnnnnnnnnnnnnnnnnnnnnnnnnnnnnnnnnnnnnnnnnnnnnnnnnnnnnnnnnnnnnnnnnnnnnnnnnnnnnnnnnnnnnnnnnnnnnnnnnnnnnnnnnnnnnnnnnnnnnnnnnnnnnnnnnnnnnnnnnnnnnnnnnnnnnnnnnnnnnnnnnnnnnnnnnnnnnnnnnnnnnnnnnnnnnnnnnnnnnnnnnnnnnnnnnnnnnnnnnnnnnnnnnnnnnnnnnnnnnnnnnnnnnnnnnnnnnnnnnnnnnnnnnnnnnnnnnnnnnnnnnnnnnnnnnnnnnnnnnnnnnnnnnnnnnnnnnnnnnnnnnnnnnnnnnnnnnnnnnnnnnnnnnnnnnnnnnnnnnnnnnnnnnnnnnnnnnnnnnnnnnnnnnnnnnnnnnnnnnnnnnnnnnnnnnnnnnnnnnnnnnnnnnnnnnnnnnnnnnnnnnnnnnnnnnnnnnnnnnnnnnnnnnnnnnnnnnnnnnnnnnnnnnnnnnnnnnnnnnnnnnnnnnnnnnnnnnnnnnnnnnnnnnnnnnnnnnnnnnnnnnnnnnnnnnnnnnnnnnnnnnnnnnnnnnnnnnnnnnnnnnnnnnnnnnnnnnnnnnnnnnnnnnnnnnnnnnnnnnnnnnnnnnnnnnnnnnnnnnnnnnnnnnnnnnnnnnnnnnnnnnnnnnnnnnnnnnnnnnnnnnnnnnnnnnnnnnnnnnnnnnnnnnnnnnnnnnnnnnnnnnnnnnnnnnnnnnnnnnnnnnnnnnnnnnnnnnnnnnnnnnnnnnnnnnnnnnnnnnnnnnnnnnnnnnnnnnnnnnnnnnnnnnnnnnnnnnnnnnnnnnnnnnnnnnnnnnnnnnnnnnnnnnnnnnnnnnnnnnnnnnnnnnnnnnnnnnnnnnnnnnnnnnnnnnnnnnnnnnnnnnnnnnnnnnnnnnnnnnnnnnnnnnnnnnnnnnnnnnnnnnnnnnnnnnnnnnnnnnnnnnnnnnnnnnnnnnnnnnnnnnnnnnnnnnnnnnnnnnnnnnnnnnnnnnnnnnnnnnnnnnnnnnnnnnnnnnnnnnnnnnnnnnnnnnnnnnnnnnnnnnnnnnnnnnnnnnnnnnnnnnnnnnnnnnnnnnnnnnnnnnnnnnnnnnnnnnnnnnnnnnnnnnnnnnnnnnnnnnnnnnnnnnnnnnnnnnnnnnnnnnnnnnnnnnnnnnnnnnnnnnnnnnnnnnnnnnnnnnnnnnnnnnnnnnnnnnnnnnnnnnnnnnnnnnnnnnnnnnnnnnnnnnnnnnnnnnnnnnnnnnnnnnnnnnnnnnnnnnnnnnnnnnnnnnnnnnnnnnnnnnnnnnnnnnnnnnnnnnnnnnnnnnnnnnnnnnnnnnnnnnnnnnnnnnnnnnnnnnnnnnnnnnnnnnnnnnnnnnnnnnnnnnnnnnnnnnnnnnnnnnnnnnnnnnnnnnnnnnnnnnnnnnnnnnnnnnnnnnnnnnnnnnnnnnnnnnnnnnnnnnnnnnnnnnnnnnnnnnnnnnnnnnnnnnnnnnnnnnnnnnnnnnnnnnnnnnnnnnnnnnnnnnnnnnnnnnnnnnnnnnnnnnnnnnnnnnnnnnnnnnnnnnnnnnnnnnnnnnnnnnnnnnnnnnnnnnnnnnnnnnnnnnnnnnnnnnnnnnnnnnnnnnnnnnnnnnnnnnnnnnnnnnnnnnnnnnnnnnnnnnnnnnnnnnnnnnnnnnnnnnnnnnnnnnnnnnnnnnnnnnnnnnnnnnnnnnnnnnnnnnnnnnnnnnnnnnnnnnnnnnnnnnnnnnnnnnnnnnnnnnnnnnnnnnnnnnnnnnnnnnnnnnnnnnnnnnnnnnnnnnnnnnnnnnnnnnnnnnnnnnnnnnnnnnnnnnnnnnnnnnnnnnnnnnnnnnnnnnnnnnnnnnnnnnnnnnnnnnnnnnnnnnnnnnnnnnnnnnnnnnnnnnnnnnnnnnnnnnnnnnnnnnnnnnnnnnnnnnnnnnnnnnnnnnnnnnnnnnnnnnnnnnnnnnnnnnnnnnnnnnnnnnnnnnnnnnnnnnnnnnnnnnnnnnnnnnnnnnnnnnnnnnnnnnnnnnnnnnnnnnnnnnnnnnnnnnnnnnnnnnnnnnnnnnnnnnnnnnnnnnnnnnnnnnnnnnnnnnnnnnnnnnnnnnnnnnnnnnnnnnnnnnnnnnnnnnnnnnnnnnnnnnnnnnnnnnnnnnnnnnnnnnnnnnnnnnnnnnnnnnnnnnnnnnnnnnnnnnnnnnnnnnnnnnnnnnnnnnnnnnnnnnnnnnnnnnnnnnnnnnnctccgnnnnnnnnnnnnnnnnnnnnnnnnnnnnnnnnnnnnnnnnnnnnnnnnnnnnnnnnnnnnnnnnnnnnnnnnnnnnnnnnnnnnnnnnnnnnnnnnnnnnnnnnnnnnnnnnnnnnnnnnnnnnnnnnnnnnnnnnnnnnnnnnnnnnnnnnnnnnnnnnnnnnnnnnnnnnnnnnnnnnnnnnnnnnnnnnnnnnnnnnnnnnnnnnnnnnnnnnnnnnnnnnnnnnnnnnnnnnnnnnnnnnnnnnnnnnnnnnnnnnnnnnnnnnnnnnnnnnnnnnnnnnnnnnnnnnnnnnnnnnnnnnnnnnnnnnnnnnnnnnnnnnnnnnnnnnnnnnnnnnnnnnnnnnnnnnnnnnnnnnnnnnnnnnnnnnnnnnnnnnnnnnnnnnnnnnnnnnnnnnnnnnnnnnnnnnnnnnnnnnnnnnnnnnnnnnnnnnnnnnnnnnnnnnnnnnnnnnnnnnnnnnnnnnnnnnnnnnnnnnnnnnnnnnnnnnnnnnnnnnnnnnnnnnnnnnnnnnnnnnnnnnnnnnnnnnnnnnnnnnnnnnnnnnnnnnnnnnnnnnnnnnnnnnnnnnnnnnnnnnnnnnnnnnnnnnnnnnnnnnnnnnnnnnnnnnnnnnnnnnnnnnnnnnnnnnnnnnnnnnnnnnnnnnnnnnnnnnnnnnnnnnnnnnnnnnnnnnnnnnnnnnnnnnnnnnnnnnnnnnnnnnnnnnnnnnnnnnnnnnnnnnnnnnnnnnnnnnnnnnnnnnnnnnnnnnnnnnnnnnnnnnnnnnnnnnnnnnnnnnnnnnnnnnnnnnnnnnnnnnnnnnnnnnnnnnnnnnnnnnnnnnnnnnnnnnnnnnnnnnnnnnnnnnnnnnnnnnnnnnnnnnnnnnnnnnnnnnnnnnnnnnnnnnnnnnnnnnnnnnnnnnnnnnnnnnnnnnnnnnnnnnnnnnnnnnnnnnnnnnnnnnnnnnnnnnnnnnnnnnnnnnnnnnnnnnnnnnnnnnnnnnnnnnnnnnnnnnnnnnnnnnnnnnnnnnnnnnnnnnnnnnnnnnnnnnnnnnnnnnnnnnnnnnnnnnnnnnnnnnnnnnnnnnnnnnnnnnnnnnnnnnnnnnnnnnnnnnnnnnnnnnnnnnnnnnnnnnnnnnnnnnnnnnnnnnnnnnnnnnnnnnnnnnnnnnnnnnnnnnnnnnnnnnnnnnnnnnnnnnnnnnnnnnnnnnnnnnnnnnnnnnnnnnnnnnnnnnnnnnnnnnnnnnnnnnnnnnnnnnnnnnnnnnnnnnnnnnnnnnnnnnnnnnnnnnnnnnnnnnnnnnnnnnnnnnnnnnnnnnnnnnnnnnnnnnnnnnnnnnnnnnnnnnnnnnnnnnnnnnnnnnnnnnnnnnnnnnnnnnnnnnnnnnnnnnnnnnnnnnnnnnnnnnnnnnnnnnnnnnnnnnnnnnnnnnnnnnnnnnnnnnnnnnnnnnnnnnnnnnnnnnnnnnnnnnnnnnnnnnnnnnnnnnnnnnnnnnnnnnnnnnnnnnnnnnnnnnnnnnnnnnnnnnnnnnnnnnnnnnnnnnnnnnnnnnnnnnnnnnnnnnnnnnnnnnnnnnnnnnnnnnnnnnnnnnnnnnnnnnnnnnnnnnnnnnnnnnnnnnnnnnnnnnnnnnnnnnnnnnnnnnnnnnnnnnnnnnnnnnnnnnnnnnnnnnnnnnnnnnnnnnnnnnnnnnnnnnnnnnnnnnnnnnnnnnnnnnnnnnnnnnnnnnnnnnnnnnnnnnnnnnnnnnnnnnnnnnnnnnnnnnnnnnnnnnnnnnnnnnnnnnnnnnnnnnnnnnnnnnnnnnnnnnnnnnnnnnnnnnnnnnnnnnnnnnnnnnnnnnnnnnnnnnnnnnnnnnnnnnnnnnnnnnnnnnnnnnnnnnnnnnnnnnnnnnnnnnnnnnnnnnnnnnnnnnnnnnnnnnnnnnnnnnnnnnnnnnnnnnnnnnnnnnnnnnnnnnnnnnnnnnnnnnnnnnnnnnnnnnnnnnnnnnnnnnnnnnnnnnnnnnnnnnnnnnnnnnnnnnnnnnnnnnnnnnnnnnnnnnnnnnnnnnnnnnnnnnnnnnnnnnnnnnnnnnnnnnnnnnnnnnnnnnnnnnnnnnnnnnnnnnnnnnnnnnnnnnnnnnnnnnnnnnnnnnnnnnnnnnnnnnnnnnnnnnnnnnnnnnnnnnnnnnnnnnnnnnnnnnnnnnnnnnnnnnnnnnnnnnnnnnnnnnnnnnnnnnnnnnnnnnnnnnnnnnnnnnnnnnnnnnnnnnnnnnnnnnnnnnnnnnnnnnnnnnnnnnnnnnnnnnnnnnnnnnnnnnnnnnnnnnnnnnnnnnnnnnnnnnnnnnnnnnnnnnnnnnnnnnnnnnnnnnnnnnnnnnnnnnnnnnnnnnnnnnnnnnnnnnnnnnnnnnnnnnnnnnnnnnnnnnnnnnnnnnnnnnnnnnnnnnnnnnnnnnnnnnnnnnnnnnnnnnnnnnnnnnnnnnnnnnnnnnnnnnnnnnnnnnnnnnnnnnnnnnnnnnnnnnnnnnnnnnnnnnnnnnnnnnnnnnnnnnnnnnnnnnnnnnnnnnnnnnnnnnnnnnnnnnnnnnnnnnnnnnnnnnnnnnnnnnnnnnnnnnnnnnnnnnnnnnnnnnnnnnnnnnnnnnnnnnnnnnnnnnnnnnnnnnnnnnnnnnnnnnnnnnnnnnnnnnttctcgtggatcgccccctatatatatatgttatatccaggactctatttcacacacattgcatatgctactttttttgattgaannnnnnnnnnnnnnnnnnnnnnnnnnnnnnnnnnnnnnnnnnnnnnnnnnnnnnnnnnnnnnnnnnnnnnnnnnnnnnacnnnnnnnnnnnnnnnnnnnnnnnnnnnnnnnnnnnnnnnnnnnnnnnnnnnnnnnnnnnnnnnnnnnnnnnnnnnnnnnnnnnnnnnnnnnnnnnnnnnnnnnnnnnnnnnnnnnnnnnnnnnnnnnnnnnnnnnnnnnnnnnnnnnnnnnnnnnnnnnnnnnnnnnnnnnnnnnnnnnnnnnnnnnnnnnnnnnnnnnnnnnnnnnnnnnnnnnnnnnnnnnnnnnnnnnnnnnnnnnnnnnnnnnnnnnnnnnnnnnnnnnnnnnnnnnnnnnnnnnnnnnnnnnnnnnnnnnnnnnnnnnnnnnnnnnnnnnnnnnnnnnnnnnnnnnnnnnnnnnnnnnnnnnnnnnnnnnnnnnnnnnnnnnnnnnnnnnnnnnnnnnnnnnnnnnnnnnnnnnnnnnnnnnnnnnnnnnnnnnnnnnnnnnnnnnnnnnnnnnnnnnnnnnnnnnnnnnnnnnnnnnnnnnnnnnnnnnnnnnnnnnnnnnnnnnnnnnnnnnnnnnnnnnnnnnnnnnnnnnnnnnnnnnnnnnnnnnnnnnnnnnnnnnnnnnnnnnnnnnnnnnnnnnnnnnnnnnnnnnnnnnnnnnnnnnnnnnnnnnnnnnnnnnnnnnnnnnnnnnnnnnnnnnnnnnnnnnnnnnnnnnnnnnnnnnnnnnnnnnnnnnnnnnnnnnnnnnnnnnnnnnnnnnnnnnnnnnnnnnnnnnnnnnnnnnnnnnnnnnnnnnnnnnnnnnnnnnnnnnnnnnnnnnnnnnnnnnnnnnnnnnnnnnnnnnnnnnnnnnnnnnnnnnnnnnnnnnnnnnnnnnnnnnnnnnnnnnnnnnnnnnnnnnnnnnnnnnnnnnnnnnnnnnnnnnnnnnnnnnnnnnnnnnnnnnnnnnnnnnnnnnnnnnnnnnnnnnnnnnnnnnnnnnnnnnnnnnnnnnnnnnnnnnnnnnnnnnnnnnnnnnnnnnnnnnnnnnnnnnnnnnnnnnnnnnnnnnnnnnnnnnnnnnnnnnnnnnnnnnnnnnnnnnnnnnnnnnnnnnnnnnnnnnnnnnnnnnnnnnnnnnnnnnnnnnnnnnnnnnnnnnnnnnnnnnnnnnnnnnnnnnnnnnnnnnnnnnnnnnnnnnnnnnnnnnnnnnnnnnnnnnnnnnnnnnnnnnnnnnnnnnnnnnnnnnnnnnnnnnnnnnnnnnnnnnnnnnnnnnnnnnnnnnnnnnnnnnnnnnnnnnnnnnnnnnnnnnnnnnnnnnnnnnnnnnnnnnnnnnnnnnnnnnnnnnnnnnnnnnnnnnnnnnnnnnnnnnnnnnnnnnnnnnnnnnnnnnnnnnnnnnnnnnnnnnnnnnnnnnnnnnnnnnnnnnnnnnnnnnnnnnnnnnnnnnnnnnnnnnnnnnnnnnnnnnnnnnnnnnnnnnnnnnnnnnnnnnnnnnnnnnnnnnnnnnnnnnnnnnnnnnnnnnnnnnnnnnnnnnnnnnnnnnnnnnnnnnnnnnnnnnnnnnnnnnnnnnnnnnnnnnnnnnnnnnnnnnnnnnnnnnnnnnnnnnnnnnnnnnnnnnnnnnnnnnnnnnnnnnnnnnnnnnnnnnnnnnnnnnnnnnnnnnnnnnnnnnnnnnnnnnnnnnnnnnnnnnnnnnnnnnnnnnnnnnnnnnnnnnnnnnnnnnnnnnnnnnnnnnnnnnnnnnnnnnnnnnnnnnnnnnnnnnnnnnnnnnnnnnnnnnnnnnnnnnnnnnnnnnnnnnnnnnnnnnnnnnnnnnnnnnnnnnnnnnnnnnnnnnnnnnnnnnnnnnnnnnnnnnnnnnnnnnnnnnnnnnnnnnnnnnnnnnnnnnnnnnnnnnnnnnnnnnnnnnnnnnnnnnnnnnnnnnnnnnnnnnnnnnnnnnnnnnnnnnnnnnnnnnnnnnnnnnnnnnnnnnnnnnnnnnnnnnnnnnnnnnnnnnnnnnnnnnnnnnnnnnnnnnnnnnnnnnnnnnnnnnnnnnnnnnnnnnnnnnnnnnnnnnnnnnnnnnnnnnnnnnnnnnnnnnnnnnnnnnnnnnnnnnnnnnnnnnnnnnnnnnnnnnnnnnnnnnnnnnnnnnnnnnnnnnnnnnnnnnnnnnnnnnnnnnnnnnnnnnnnnnnnnnnnnnnnnnnnnnnnnnnnnnnnnnnnnnnnnnnnnnnnnnnnnnnnnnnnnnnnnnnnnnnnnnnnnnnnnnnnnnnnnnnnnnnnnnnnnnnnnnnnnnnnnnnnnnnnnnnnnnnnnnnnnnnnnnnnnnnnnnnnnnnnnnnnnnnnnnnnnnnnnnnnnnnnnnnnnnnnnnnnnnnnnnnnnnnnnnnnnnnnnnnnnnnnnnnnnnnnnnnnnnnnnnnnnnnnnnnnnnnnnnnnnnnnnnnnnnnnnnnnnnnnnnnnnnnnnnnnnnnnnnnnnnnnnnnnnnnnnnnnnnnnnnnnnnnnnnnnnnnnnnnnnnnnnnnnnnnnnnnnnnnnnnnnnnnnnnnnnnnnnnnnnnnnnnnnnnnnnnnnnnnnnnnnnnnnnnnnnnnnnnnnnnnnnnnnnnnnnnnnnnnnnnnnnnnnnnnnnnnnnnnnnnnnnnnnnnnnnnnnnnnnnnnnnnnnnnnnnnnnnnnnnnnnnnnnnnnnnnnnnnnnnnnnnnnnnnnnnnnnnnnnnnnnnnnnnnnnnnnnnnnnnnnnnnnnnnnnnnnnnnnnnnnnnnnnnnnnnnnnnnnnnnnnnnnnnnnnnnnnnnnnnnnnnnnnnnnnnnnnnnnnnnnnnnnnnnnnnnnnnnnnnnnnnnnnnnnnnnnnnnnnnnnnnnnnnnnnnnnnnnnnnnnnnnnnnnnnnnnnnnnnnnnnnnnnnnnnnnnnnnnnnnnnnnnnnnnnnnnnnnnnnnnnnnnnnnnnnnnnnnnnnnnnnnnnnnnnnnnnnnnnnnnnnnnnnnnnnnnnnnnnnnnnnnnnnnnnnnnnnnnnnnnnnnnnnnnnnnnnnnnnnnnnnnnnnnnnnnnnnnnnnnnnnnnnnnnnnnnnnnnnnnnnnnnnnnnnnnnnnnnnnnnnnnnnnnnnnnnnnnnnnnnnnnnnnnnnnnnnnnnnnnnnnnnnnnnnnnnnnnnnnnnnnnnnnnnnnnnnnnnnnnnnnnnnnnnnnnnnnnnnnnnnnnnnnnnnnnnnnnnnnnnnnnnnnnnnnnnnnnnnnnnnnnnnnnnnnnnnnnnnnnnnnnnnnnnnnnnnnnnnnnnnnnnnnnnnnnnnnnnnnnnnnnnnnnnnnnnnnnnnnnnnnnnnnnnnnnnnnnnnnnnnnnnnnnnnnnnnnnnnnnnnnnnnnnnnnnnnnnnnnnnnnnnnnnnnnnnnnnnnnnnnnnnnnnnnnnnnnnnnnnnnnnnnnnnnnnnnnnnnnnnnnnnnnnnnnnnnnnnnnnnnnnnnnnnnnnnnnnnnnnnnnnnnnnnnnnnnngtgcacacacgggggcgagcgaaagcatagtgcctcgcctccagcggcaacgatgcctacgcatgtcacatccctatttggggcatcgtcttggcacccccttccaacactaatagtgaaaacccatgtccgctttgctcgacgcaatagaagcggcgctcttcatcatgaccctcttgggggcgttgccggtgagtgtggatgcctctcggtcgcagcggcgggttcaagatggtttggagctacagtcgacgacacattgaatctgccgacaggtagtcccgtgtgcatgtatcgtttagatgtgattatgtttcttctctcacatttttgcgtgccgatagggccgacgattcttgatctggagcgagagggtggagggtgtgacaaaatccagtgattttctttcagggaacgcatgtttgcttgctgtcggcggccttcgttgcgtgctttagtggtctagcctcttctatgcttcttctcgcagctcgctggagatatcttgtgaagcaactttggtgcttgttgggggtgctcaactttgtcaagtttttcctttgatcaacatctataagaacttttttcaatacacggatataaagcggggcaaaagcctatttcgagcacttcgatttttctgtatgctatgtaatgtatatatgtgcatagaagcataacatcgaaaaacaaatattcccttcatccacaatataagatctttttcgaactaacaactatgttagcttgaaaaatgaacttatattatgggacggatggagtagaagtgaatacaaaaacaaataaaactgaacacggcgacatcagcaggaaaaannnnnnnnnnnnnnnnnnnnnnnnnnnnnnnnnnnnnnnnnnnnnnnnnnnnnnnnnnnnnnnnnnnnnnnnnnnnnnnnnnnnnnnnnnnnnnnnnnnnnnnnnnnnnnnnnnnnnnntcactaaccccctctaaatggccagctggcatgatgaacagtgcgaaaaataaaaaaatatgaacaaaaaatctgaaaatctttggcatcaaagatacccctggtgtgtgaatagtaaaaatgttcnnnnnnnnnnnnnnnnnnnnnnnnnnnnnnnnnnnnnnnnnnnnnnnnnnnnnnnnnnnnnnnnnnnnnnnnnnnnnnnnnnnnnnnnnnnnnnnnnnnnnnnnnnnnnnnnnnnnnnnnnnnnnnnnnnnnnnnnnnnnnnnnnnnnnnnnnnnnnnnnnnnnnnnnnnnnnnnnnnnnnnnnnnnnnnnnnnnnnnnnnnnnnnnnnnnnnnnnnnnnnnnnnnnnnnnnnnnnnnnnnnnnnnnnnnnnnnnnnnnnnnnnnnnnnnnnnnnnnnnnnnnnnnnnnnnnnnnnnnnnnnnnnnnnnnnnnnnnnnnnnnnnnnnnnnnnnnnnnnnnnnnnnnnnnnnnnnnnnnnnnnnnnnnnnnnnnnnnnnnnnnnnnnnnnnnnnnnnnnnnnnnnnnnnnnnnnnnnnnnnnnnnnnnnnnnnnnnnnnnnnnnnnnnnnnnnnnnnnnnnnnnnnnnnnnnnnnnnnnnnnnnnnnnnnnnnnnnnnnnnnnnnnnnnnnnnnnnnnnnnnnnnnnnnnnnnnnnnnnnnnnnnnnnnnnnnnnnntgcgccagggtctcttcgatgacagaggatctcagttttttgatatttttttatatttattttttgtcgtgtactgttcatcacgcacaggaatttaatactgtttgtcgcgcactgttacggttactgtttacgtgtcagctggccagttagagcctgtcnnnnnnnnnnnnnnnnnnnnnnnnnnnnnnnnnnnnnnnnnnnnnnnnnnnnnnnnnnnnnnnnnnnnnnnnnnnnnnnnnnnnnnnnnnnnnnnnnnnnnnnnnnnnnnnnnnnnnnnnnnnncaggaaaaaaaatgaagaataatagtatttttcatcttagttttgtaatgctgaataggccgaaaatgcggatgatcctttaaaaaattgaagatggacgaagagagggattgacatgatgctacgctacggctgcatggctgtctagttaattaacgcttgtttcaaaacagtgcaagtgggacagtattttggtgaaataaaacaccctcccatcgtttcaaaatactaagatataaatatgcacctgtagaaaaatccgtagaactctctctatttactcatcaacgtgtcgggtaaccttttactctactggcacacatgcaaatcactaatctaacagcgtcaaccaagcaaatcagtttctggggcaatggtcttcagcccattgctcgctccaacagcattaagttgtgctagattgacgtaccgcttaaaatccgattgaaatggctcaatttgtgcaactctagaatcagcctacatgtcctgcacgtacgactctgcagcagtggaagccgatcgacttggcaggctggttggtctcgaactctcgatcgatcttgtccattgtcggtccaaatggtcccgtctctctcccacgcatgcatatgcacatgcacatccacactattactacttactcactctataatttatatgtgcttctagaatcaacacgcgtacgtactacgtgtaccgctgcgcagttcaagtccacgccaaaacgccattgcagcctttttctctcattgcgtacttgatgccaatgctactgctgccagtaccagtgcagtcggggtgatggagctattaaatgtgccgaaaatgccgatgctacaccttttctttaacattaactaagcatgtctcgccttcaaaaacagcaagggcctgttttgtaacagtcaagagagaaaaccatggcccaggttcagttgaagaacaaaacctagataagnnnnnnnnnnnnnnnnnnnnnnnnnnnnnnnnnnnnnnnnnnnnnnnnnnnnnnnnnnnnnnnnnnnnnnnnnnnnnnnnnnnnnnnnnnnnnnnnnnnnnnnnnnnnnnnnnnnnnnnnnnnnnnnnnnnnnnnnnnnnnnnnnnnnnnnnnnnnnnnnnnnnnnnnnnnnnnnnnnnnnnnnnnnnnnnnnnnnnnnnnnnnnnnnnnnnnnnnnnnnnnnnnnnnnnnnnnnnnnnnnnnnnnnnnnnnnnnnagcagtttagccagcccagctagtaaattactgacacaccaacaccagcagtccaacatgcaattttcatatcatatcagctagcttgtgatgacccacttgccacattttttcctacttccgttcgaatgggcgtgttgactggcttcgaaattttgaagctgcccttggaatccactaataagctaggaccggagaagctcgtcccatgtgtgtttgcttaggtgtctgtcaatcacttatggtctggttaggacttgtgtacaaaggaccacggctctatcagagcgtagcgacgtactgtacgtgctttgccgcgtgtacgaatatcttgcttcactgccacaggcaatatgtgcatgttcttggccctcgtggcagtattgcagctatagctgtcgatccatgtgagcgcaacgggcagtagaaaaggcctggttaacgaactaattatttgtagaggcttgctttggtacaaccccctcacaaaccatataagggtagtatggtcatttgatcgtaaggtatacccaccccgtataagtagacatacacagcccgtcacaccccttcatccttggcctggctcattgtttttcttctttttttaaccttcaaaaaacaagtgcaagaggtatgatttgaactcctaacctcttggctttcgtccacctgctataaccaattgagacagcttacatgttgtgcaagtttgctcctccagtcctaatatttagtttctgcataactctattcacgcatacaagcgagttccaatctttgattgattttggaatgctattgccgctctactgaatggatttgcgaagctcgtgggaggtggccgaggtaaatacgcatatatgcacatggctaggatctagtaataaagcggattaaaggggcagatttacggggattagttgcatgccaaacagaggcgggcttttcctaaataaaaaaaaaaggagaggtgggcgtgcacatgcccacaggctaggatttggaaatccaagtcagatttaatataggagagattgccagcgagacggattacgagcgacagatcaggaaaatatcgctagaaaatgggaaggcgcagagtaatactgaaaaagatttaaaaaaattatgtgcaaactagatagaaacggtgggagtactttttgtgtgtgcatcttctcagtctaggtttttttcattggcatttggtttcannnnnnnnnnnnnnnnnnnnnnnnnnnnnnnnnnctctagtcttttcatttgcttaaattcatgaacattttcttaaatttttgaactttttttaaatccatgaactttaaatgacctcattttttgcatggccttgtatgatcaatttaaggnnnnnnnnnnnnnnnnnnnnnnnnnnnnnnnnnnnnnnnnnnnnnnnnnnnnnnnnnnnnnnnnnnnnnnnnnnnnnnnnnnnnnnnnnnnnnnnnnnnnnnnnnnnnnnnnnnnnnnnnnnnnnnnnnnnnnnnnnnnnnnnnnnnnnnnnnnnnnnnnnnnnnnnnnnnnnnnnnnnnnnnnnnnnnnnnnnnnnnnnnnnnnnnnnnnnnnnnnnnnnnnnnnnnnnnnnnnnnnnnnnnnnnnnnnnnnnnnnnnnnnnnnnnnnnnnnnnnnnnnnnnnnnnnnnnnnnnnnnnnnnnnnnnnnnnnnnnnnnnnnnnnnnnnnnnnnnnnnnnnnnnnnnnnnnnnnnnnnnnnnnnnnnnnnnnnnnnnnnnnnnnnnnnnnnnnnnnnnnnnnnnnnnnnnnnnnnnnnnnnnnnnnnnnnnnnnnnnnnnnnnnnnnnnnnnnnnnnnnnnnnnnnnnnnnnnnnnnnnnnnnnnnnnnnnnnnnnnnnnnnnnnnnnnnnnnnnnnnnnnnnnnnnnnnnnnnnnnnnnnnnnnnnnnnnnnnnnnnnnnnnnnnnnnnnnnnnnnnnnnnnnnnnnnnnnnnnnnnnnnnnnnnnnnnnnnnnnnnnnnnnnnnnnnnnnnnnnnnnnnnnnnnnnnnnnnnnnnnnnnnnnnnnnnnnnnnnnnnnnnnnnnnnnnnnnnnnnnnnnnnnnnnnnnnnnnnnnnnnnnnnnnnnnnnnnnnnnnnnnnnnnnnnnnnnnnnnnnnnnnnnnnnnnnnnnnnnnnnnnnnnnnnnntagtcattttaaggatgtccaaaagttgatcatgttccacatatggtgtctgggtaaggtgagaaggctctgtttgagataatgttgtttctcgacatccgtcaacttgattcaattattttttttcaccgccttgtacaatcaattcaaagcaccccctgccaagttgtttcggttnnnnnnnnnnnnnnnnnnnnnnnnnnnnnnnnnnnnnnnnnnnnnnnnnnnnnnnnnnnnnnnnnnnnnnnnnnnnnnnnnnnnnnnnnnnnnnnnnnnnnnnnnnnnnnnnnnnnnnnnnnnnnnnnnnnnnnnnnnnnnnnnnnnnnnnnnnnnnnnnnnnnnnnnnnnnnnnnnnnnnnnnnnnnnnnnnnnnnnnnnnnnnnnnnnnnnnnnnnnnnnnnnnnnnnnnnnnnnnnnnnnnnnnnnnnnnnnnnnnnnnnnnnnnnnnnnnnnnnnnnnnnnnnnnnnnnnnnnnnnnnnnnnnnnnnnnnnnnnnnnnnnnnnnnnnnnnnnnnnnnnnnnnnnnnnnnnnnnnnnnnnnnnnnnnnnnnnnnnnnnnnnnnnnnnnnnnnnnnnnnnnnnnnnnnnnnnnnnnnnnnnnnnnnnnnnnnnnnnnnnnnnnnnnnnnnnnnnnnnnnnnnnnnnnnnnngtccgtcctgagatttacaaaaagtagaccgtgtgcaaccgaaggcgagaatggtctgtctgaaatcaagnnnnnnnnnnnnnnnnnnnnnnnnnnnnnnnnnnnnnnnnnnnnnnnnnnnnnnnnnnnnnnnnnnnnnnnnnnnnnnnnnnnnnnnnnnnnnnnnnnnnnnnnnnnnnnnnnnnnnnnnnnnnnnnnnnnnnnnnnnnnnnnnnnnnnnnnnnnnnnnnnnnnnnnnnnnnnnnnnnnnnnnnnnnnnnnnnnnnnnntgcctcatatataagttggtttcatttatccatggtccaaaaaaccaccagttgggaggagtgtgctagactaggccacatgggtgcatatgtgagcatatagtttttcctaatttaatgcttccgttagttacaatttcagtcattatcaatcaacatgagcattttattatatcctaaccatttcttgaatttttaaaataatttcagaatttcaaattgtgtatgaaaattttataaacttgaacactttttccaaaattgttaacaaattttcaacaattgatgttgaacgcaaattgcaaaccacacactttttaaaaaaattatgaagttttaataaatgcaaacatttcttacttttgtgaataaagattcgaaagccggaatattttttgaaagtcctacaagcgaaaaaagtgtaaaatgggcaggcgggcgcggggggtttnnnnnnnnnnnnnnnnnnnnnnnnnnnnnnnnnnnnnnnnncatcgctagctaaaccagcaagcacacaggcaaaattttcaaaaaaaggaagcacaaaggctgcttaattgattccggtcgtacccacatgtcttgatgtggatgttgtggtaggtctatggtaaaaaaacacacgagctgattgactaaaaaaggcccgacgaatgtagctgttgtaattttagttcctctccgattttcatggcatgcaattcacgggcaagatccgaaaataaatgacgcatgcagttgggagttcagcgggagaaaaaatcattctcaggtgagatggaaagaaatcccatgcatgcagggagataattaaggtgaccgcggggccgtgcgtaaagtaggaaataaatcactagtagccggttagattgtgtgtgacattccatgtaattagcgcctaattagtgtgatttggggcatgtgcggtccctcattccgtatgcctcactgacgggcctggttttattgaaaaagagaaatgaagtataaaaagcaaaacaaacaaggtgtcttgttggttaccacaatttgtttccagcctgtggtctcgagttcgaatcatgtcaaacacagaatttttttaatctaaaaggaacgtaaatgggccagcccatgaggaggtggaaaggtcgtgtaccggcgcgcatacagcatacttttaaaaaagaccatcctaccctttatgacgaaggggtacgagttaatctcagccttcgatgtgtttaggggggtgtacctaagcggaagtgttatttgtattttttaataaagatcaggaagatatgataaaatccacaagtacaaagctacccaattttcttaggccctcaaccgtagaacaatggttctatagtattttcataataatcatcttaatagtgtgttacaatgaggggagaaaaggaagtaatagagaaaatctatccaaagaccaagaaagcaatgtcttcactcttcagcctatgccagttctagggatcatcattggccaaaattttaaccacaaaatgacacacttataaaagtaactttagtaccacatcaatatcatgacatatttatcatggcatgaatcgagtacaagggtccctgcaaaagaaacgaatcgagtactccctccattcctctacgtaatgcgtgttatttttctgaggaagtttggcaatgtagtgcggggttggtgttttggacggagttaaccctcgctgggctgaattgtgtggctgagaagtgtgggttgctaggnnnnnnnnnnnnnnnnnnnnnnnnnnnnnnnnnccaacaaatggatctattatgacccgctcaatttcagctctttgatcattgtgttattannnnnnnnnnnnnnnnnnnnnnnnnnnnnnnnnnnnnnnnnnnnnnnnnnnnnnnnnnnnnnnnnnnnnnnnnnnnnnnnnnnnnnnnnnnnnnnnnnnnnnnnnnnnnnnnnnnnnnnnnnnnnnnnnnnnnnnnnnnnnnnnnnnnnnnnnnnnnnnnnnnnnnnnnnnnnnnnnnnnnnnnnnnnnnnnnnnnnnnnnnnnnnnnnnnnnnnnnnnnnnnnnnnnnnnnnnnnnnnnnnnnnnnnnnnnnnnnncttcactatgttgctactccactgaaaatccgacttgtgcttcctccgggtctatgaaattgttgagtcccatcatccctaacccatagtctaacatatggagtcatttggcttcaactctgcattgccacccaattcaaaattcgcataggttttctccaagtctgccaaactaccatgggcatcccatcagccaacttttaatttcttccaacattcgtcatccactccctcctaaaagttcagacaaattaaagaagttccccatacaacttcgcaatagcgatatagtacatcaaaaatcccaaattgctctcattttccttattttaagcattgcatacaaagaaaaatagctggaatcatatcatatgcacataatgatcaaggtgtagcacttccgttctcgaattagctacaaatcacattaaacaaattcttctcacttgaattgatggctcatgcaacatatttttattctgttatgtaaatgattgcatgcatcgcattccctctagttggctactatgacataacttaatgacagagcatccagtcactgatgtctgcacttccctatnnnnnnnnnnnnnnnnnnnnnnnnnnnnnnnnnnnnnnnnnnnnnnnnnnnnnnnnnnnnnnnnnnnnnnnnnnnnnnnnnnnnnnnnnnnnnnnnnnnnnnnnnnnnnnnnnnnnnnnnnnnnnnnnnnnnnnnnnnnnnnnnnnnnnnnnnnnnnnnnnnnnnnnnnnnnnnnnnnnnnnnnnnnnnnnnnnnnnnnnnnnnnnnnnnnnnnnnnnnnnnnnnnnnnnnnnnnnnnnnnnnnnnnnnnnnnnnnnnnnnnnnnnnnnnnnnnnnnnnnnnnnnnnnnnnnnnnnnnnnnnnnnnnnnnnnnnnnnnnnnnnnnnnnnnnnnnnnnnnnnnnnnnnnnnnnnnnnnnnnnnnnnnnnnnnnnnnnnnnnnnnnnnnnnnnnnnnnnnnnnnnnnnnnnnnnnnnnnnnnnnnnnnnnnnnnnnnnnnnnnnnnnnnnnnnnnnnnnnnnnnnnnnnnnnnnnnnnnnnnnnnnnnnnnnnnnnnnnnnnnnnnnnnnnnnnnnnnnnnnnnnnnnnnnnnnnnnnnnnnnnnnnnnnnnnnnnnnnnnnnnnnnnnnnnnnnnnnnnnnnnnnnnnnnnnnnnnnnnnnnnnnnnnnnnnnnnnnnnnnnnnnnnnnnnnnnnnnnnnnnnnnnnnnnnnnnnnnnnnnnnnnnnnnnnnnnnnnnnnnnnnnnnnnnnnnnnnnnnnnnnnnnnnnnnnnnnnnnnnnnnnnnnnnnnnnnnnnnnnnnnnnnnnnnnnnnnnnnnnnnnnnnnnnnnnnnnnnnnnnnnnnnnnnnnnnnnnnnnnnnnnnnnnnnnnnnnnnnnnnnnnnnnnnnnnnnnnnnnnnnnnnnnnnnnnnnnnnnnnnnnnnnnnnnnnnnnnnnnnnnnnnnnnnnnnnnnnnnnnnnnnnnnnnnnnnnnnnnnnnnnnnnnnnnnnnnnnnnnnnnnnnnnnnnncatttagaaactcggctcatcacatagctcacaaatattcatgccgacccttcataccaactccaccatggccgtacgactcggccgctccgcccctcatgtgcaagcggtcgctttcgccatttacccgattctagacactttccccttttgttcagatcttgcattttatcatnnnnnnnnnnnnnnnnnnnnnnnnnnnnnnnnnnnnnnnnnnnnnnnnnnnnnnnnnnnnnnnnnnnnnnnnnnnnnnnnnnnnnnnnnnnnnnnnnnnnnnnnnnnnnnnnnnnnnnnnnnnnnnnntcaagccaaccctccattagtccttagttaaaccggacagggaagccggtttacgaattgccggtttaacaatatttgtaacgcctgacttgtttgatagtgaaccgttttttttttccctcnnnnnnnnnnnnnnnnnnnnnnnnnnnnnnnnnnnnnnnnnnnnnnnnnnnnnnnnnnnnnnnnnnnnnnnnnnnnnnnnnnnnnnnnnnnnnnnnnnnnnnnnnnnnnnnnnnnnnnnnnnnnnnnnnnnnnnnnnnnnnnnnnnnnnnnnnnnnnnnnnnnnnnnnnnnnnnnnnnnnnnnnnnnnnnnnnnnnnnnnnnnnnnnnnnnnnnnnnnnnnnnnnnnnnnnnnnnnnnnnnnnnnnnnnnnnnnnnnnnnnnnnnnnnnnnnnnnnnnnnnnnnnnnnnnnnnnnnnnnnnnnnnnnnnnnnnnnnnnnnnnnnnnnnnnnnnnnnnnnnnnnnnnnnnnnnnnnnnnnnnnnnnnnnnnnnnnnnnnnnnnnnnnnnnnnnnnnnnnnnnnnnnnnnnnnnnnnnnnnnnnnnnnnnnnnnnnnnnnnnnnnnnnnnnnnnnnnnnnnnnnnnnnnnnnnnnnnnnnnnnnnnnnnnnnnnnnnnnnnnnnnnnnnnnnnnnnnnnnnnnnnnnnnnnnnnnnnnnnnnnnnnnnnnnnnnnnnnnnnnnnnnnnnnnnnnnnnnnnnnnnnnnnnnnnnnnnnnnnnnnnnnnnnnnnnnnnnnnnnnnnnnnnnnnnnnnnnnnnnnnnnnnnnnnnnnnnnnnnnnnnnnnnnnnnnnnnnnnnnnnnnnnnnnnnnnnnnnnnnnnnnnnnnnnnnnnnnnnnnnnnnnnnnnnnnnnnnnnnnnnnnnnnnnnnnnnnnnnnnnnnnnnnnnnnnnnnnnnnnnnnnnnnnnnnnnnnnnnnnnnnnnnnnnnnnnnnnnnnnnnnnnnnnnnnnnnnnnnnnnnnnnnnnnnnnnnnnnnnnnnnnnnnnnnnnnnnnnnnnnnnnnnnnnnnnnnnnnnnnnnnnnnnnnnnnnnnnnnnnnnnnnnnnnnnnnnnnnnnnnnnnnnnnnnnnnnnnnnnnnnnnnnnnnnnnnnnnnnnnnnnnnnnnnnnnnnnnnnnnnnnnnnnnnnnnnnnnnnnnnnnnnnnnnnnnnnnnnnnnnnnnnnnnnnnnnnnnnnnnnnnnnnnnnnnnnnnnnnnnnnnnnnnnnnnnnnnnnnnnnnnnnnnnnnnnnnnnnnnnnnnnnnnnnnnnnnnnnnnnnnnnnnnnnnnnnnnnnnnnnnnnnnnnnnnnnnnnnnnnnnnnnnnnnnnnnnnnnnnnnnnnnnnnnnnnnnnnnnnnnnnnnnnnnnnnnnnnnnnnnnnnnnnnnnnnnnnnnnnnnnnnnnnnnnnnnnnnnnnnnnnnnnnnnnnnnnnnnnnnnnnnnnnnnnnnnnnnnnnnnnnnnnnnnnnnnnnnnnnnnnnnnnnnnnnnnnnnnnnnnnnnnnnnnnnnnnnnnnnnnnnnnnnnnnnnnnnnnnnnnnnnnnnnnnnnnnnnnnnnnnnnnnnnnnnnnnnnnnnnnnnnnnnnnnnnnnnnnnnnnnnnnnnnnnnnnnnnnnnnnnnnnnnnnnnnnnnnnnnnnnnnnnnnnnnnnnnnnnnnnnnnnnnnnnnnnnnnnnnnnnnnnnnnnnnnnnnnnnnnnnnnnnnnnnnnnnnnnnnnnnnnnnnnnnnnnnnnnnnnnnnnnnnnnnnnnnnnnnnnnnnnnnnnnnnnnnnnnnnnnnnnnnnnnnnnnnnnnnnnnnnnnnnnnnnnnnnnnnnnnnnnnnnnnnnnnnnnnnnnnnnnnnnnnnnnnnnnnnnnnnnnnnnnnnnnnnnnnnnnnnnnnnnnnnnnnnnnnnnnnnnnnnnnnnnnnnnnnnnnnnnnnnnnnnnnnnnnnnnnnnnnnnnnnnnnnnnnnnnnnnnnnnnnnnnnnnnnnnnnnnnnnnnnnnnnnnnnnnnnnnnnnnnnnnnnnnnnnnnnnnnnnnnnnnnnnnnnnnnnnnnnnnnnnnnnnnnnnnnnnnnnnnnnnnnnnnnnnnnnnnnnnnnnnnnnnnnnnnnnnnnnnnnnnnnnnnnnnnnnnnnnnnnnnnnnnnnnnnnnnnnnnnnnnnnnnnnnnnnnnnnnnnnnnnnnnnnnnnnnnnnnnnnnnnnnnnnnnnnnnnnnnnnnnnnnnnnnnnnnnnnnnnnnnnnnnnnnnnnnnnnnnnnnnnnnnnnnnnnnnnnnnnnnnnnnnnnnnnnnnnnnnnnnnnnnnnnnnnnnnnnnnnnnnnnnnnnnnnnnnnnnnnnnnnnnnnnnnnnnnnnnnnnnnnnnnnnnnnnnnnnnnnnnnnnnnnnnnnnnnnnnnnnnnnnnnnnnnnnnnnnnnnnnnnnnnnnnnnnnnnnnnnnnnnnnnnnnnnnnnnnnnnnnnnnnnnnnnnnnnnnnnnnnnnnnnnnnnnnnnnnnnnnnnnnnnnnnnnnnnnnnnnnnnnnnnnnnnnnnnnnnnnnnnnnnnnnnnnnnnnnnnnnnnnnnnnnnnnnnnnnnnnnnnnnnnnnnnnnnnnnnnnnnnnnnnnnnnnnnnnnnnnnnnnnnnnnnnnnnnnnnnnnnnnnnnnnnnnnnnnnnnnnnnnnnnnnnnnnnnnnnnnnnnnnnnnnnnnnnnnnnnnnnnnnnnnnnnnnnnnnnnnnnnnnnnnnnnnnnnnnnnnnnnnnnnnnnnnnnnnnnnnnnnnnnnnnnnnnnnnnnnnnnnnnnnnnnnnnnnnnnnnnnnnnnnnnnnnnnnnnnnnnnnnnnnnnnnnnnnnnnnnnnnnnnnnnnnnnnnnnnnnnnnnnnnnnnnnnnnnnnnnnnnnnnnnnnnnnnnnnnnnnnnnnnnnnnnnnnnnnnnnnnnnnnnnnnnnnnnnnnnnnnnnnnnnnnnnnnnnnnnnnnnnnnnnnnnnnnnnnnnnnnnnnnnnnnnnnnnnnnnnnnnnnnnnnnnnnnnnnnnnnnnnnnnnnnnnnnnnnnnnnnnnnnnnnnnnnnnnnnnnnnnnnnnnnnnnnnnnnnnnnnnnnnnnnnnnnnnnnnnnnnnnnnnnnnnnnnnnnnnnnnnnnnnnnnnnnnnnnnnnnnnnnnnnnnnnnnnnnnnnnnnnnnnnnnnnnnnnnnnnnnnnnnnnnnnnnnnnnnnnnnnnnnnnnnnnnnnnnnnnnnnnnnnnnnnnnnnnnnnnnnnnnnnnnnnnnnnnnnnnnnnnnnnnnnnnnnnnnnnnnnnnnnnnnnnnnnnnnnnnnnnnnnnnnnnnnnnnnnnnnnnnnnnnnnnnnnnnnnnnnnnnnnnnnnnnnnnnnnnnnnnnnnnnnnnnnnnnnnnnnnnnnnnnnnnnnnnnnnnnnnnnnnnnnnnnnnnnnnnnnnnnnnnnnnnnnnnnnnnnnnnnnnnnnnnnnnnnnnnnnnnnnnnnnnnnnnnnnnnnnnnnnnnnnnnnnnnnnnnnnnnnnnnnnnnnnnnnnnnnnnnnnnnnnnnnnnnnnnnnnnnnnnnnnnnnnnnnnnnnnnnnnnnnnnnnnnnnngcnnnnnnnnnnnnnnnnnnnnnnnnnnnnnnnnnnnnnnnnnnnnnnnnnngtttgaacccccccccccccccannnnnnnnnnnnnnnnnnnnnnnnnnnnnnnnnnnnnnnnnnnnnnnnnnnnnnnnnnnnnnnnnnnnnnnnnnnnnnnnnnnnnnnnnnnnnnnnnnnnnnnnnnnnnnnnnnnnnnnnnnnnnnnnnnnnnnnnnnnnnnnnnnnnnnnnnnnnnnnnnnnnnnnnnnnnnnnnnnnnnnnnnnnnnnnnnnnnnnnnnnnnnnnnnnnnnnnnnnnnnnnnnnnnnnnnnnnnnnnnnnnnnnnnnnnnnnnnnnnnnnnnnnnnnnnnnnnnnnnnnnnnnnnnnnnnnnnnnnnnnnnnnnnnnnnnnnnnnnnnnnnnnnnnnnnnnnnnnnnnnnnnnnnnnnnnnnnnnnnnnnnnnnnnnnnnnnnnnnnnnnnnnnnnnnnnnnnnnnnnnnnnnnnnnnnnnnnnnnnnnnnnnnnnnnnnnnnnnnnnnnnnnnnnnnnnnnnnnnnnnnnnnnnnnnnnnnnnnnnnnnnnnnnnnnnnnnnnnnnnnnnnnnnnnnnnnnnnnnnnnnnnnnnnnnnnnnnnnnnnnnnnnnnnnnnnnnnnnnnnnnnnnnnnnnnnnnnnnnnnnnnnnnnnnnnnnnnnnnnnnnnnnnnnnnnnnnnnnnnnnnnnnnnnnnnnnnnnnnnnnnnnnnnnnnnnnnnnnnnnnnnnnnnnnnnnnnnnnnnnnnnnnnnnnnnnnnnnnnnnnnnnnnnnnnnnnnnnnnnnnnnnnnnnnnnnnnnnnnnnnnnnnnnnnnnnnnnnnnnnnnnnnnnnnnnnnnnnnnnnnnnnnnnnnnnnnnnnnnnnnnnnnnnnnnnnnnnnnnnnnnnnnnnnnnnnnnnnnnnnnnnnnnnnnnnnnnnnnnnnnnnnnnnnnnnnnnnnnnnnnnnnnnnnnnnnnnnnnnnnnnnnnnnnnnnnnnnnnnnnnnnnnnnnnnnnnnnnnnnnnnnnnnnnnnnnnnnnnnnnnnnnnnnnnnnnnnnnnnnnnnnnnnnnnnnnnnnnnnnnnnnnnnnnnnnnnnnnnnnnnnnnnnnnnnnnnnnnnnnnnnnnnnnnnnnnnnnnnnnnnnnnnnnnnnnnnnnnnnnnnnnnnnnnnnnnnnnnnnnnnnnnnnnnnnnnnnnnnnnnnnnnnnnnnnnnnnnnnnnnnnnnnnnnnnnnnnnnnnnnnnnnnnnnnnnnnnnnnnnnnnnnnnnnnnnnnnnnnnnnnnnnnnnnnnnnnnnnnnnnnnnnnnnnnnnnnnnnnnnnnnnnnnnnnnnnnnnnnnnnnnnnnnnnnnnnnnnnnnnnnnnnnnnnnnnnnnnnnnnnnnnnnnnnnnnnnnnnnnnnnnnnnnnnnnnnnnnnnnnnnnnnnnnnnnnnnnnnnnnnnnnnnnnnnnnnnnnnnnnnnnnnnnnnnnnnnnnnnnnnnnnnnnnnnnnnnnnnnnnnnnnnnnnnnnnnnnnnnnnnnnnnnnnnnnnnnnnnnnnnnnnnnnnnnnnnnnnnnnnnnnnnnnnnnnnnnnnnnnnnnnnnnnnnnnnnnnnnnnnnnnnnnnnnnnnnnnnnnnnnnnnnnnnnnnnnnnnnnnnnnnnnnnnnnnnnnnnnnnnnnnnnnnnnnnnnnnnnnnnnnnnnnnnnnnnnnnnnnnnnnnnnnnnnnnnnnnnnnnnnnnnnnnnnnnnnnnnnnnnnnnnnnnnnnnnnnnnnnnnnnnnnnnnnnnnnnnnnnnnnnnnnnnnnnnnnnnnnnnnnnnnnnnnnnnnnnnnnnnnnnnnnnnnnnnnnnnnnnnnnnnnnnnnnnnnnnnnnnnnnnnnnnnnnnnnnnnnnnnnnnnnnnnnnnnnnnnnnnnnnnnnnnnnnnnnnnnnnnnnnnnnnnnnnnnnnnnnnnnnnnnnnnnnnnnnnnnnnnnnnnnnnnnnnnnnnnnnnnnnnnnnnnnnnnnnnnnnnnnnnnnnnnnnnnnnnnnnnnnnnnnnnnnnnnnnnnnnnnnnnnnnnnnnnnnnnnnnnnnnnnnnnnnnnnnnnnnnnnnnnnnnnnnnnnnnnnnnnnnnnnnnnnnnnnnnnnnnnnnnnnnnnnnnnnnnnnnnnnnnnnnnnnnnnnnnnnnnnnnnnnnnnnnnnnnnnnnnnnnnnnnnnnnnnnnnnnnnnnnnnnnnnnnnnnnnnnnnnnnnnnnnnnnnnnnnnnnnnnnnnnnnnnnnnnnnnnnnnnnnnnnnnnnnnnnnnnnnnnnnnnnnnnnnnnnnnnnnnnnnnnnnnnnnnnnnnnnnnnnnnnnnnnnnnnnnnnnnnnnnnnnnnnnnnnnnnnnnnnnnnnnnnnnnnnnnnnnnnnnnnnnnnnnnnnnnnnnnnnnnnnnnnnnnggctggttgnnnnnnnnnnnnnnnnnnnnnnnnnnnnnnnnnnnnnnnnnnnnnnnnnnnnnnnnnnnnnnnnnnnnnnnnnnnnnnnnnnnnnnnnnnnnnnnnnnnnnnnnnnnnnnnnnnnnnnnnnnnnnnnnnnnnnnnnnnnnnnnnnnnnnnnnnnnnnnnnnnnnnnnnnnnnnnnnnnnnnnnnnnnnnnnnnnnnnnnnnnnnnnnnnnnnnnnnnnnnnnnnnnnnnnnnnnnnnnnnnnnnnnnnnnnnnnnnnnnnnnnnnnnnnnnnnnnnnnnnnnnnnnnnnnnnnnnnnnnnnnnnnnnnnnnnnnnnnnnnnnnnnnnnnnnnnnnnnnnnnnnnnnnnnnnnnnnnnnnnnnnnnnnnnnnnnnnnnnnnnnnnnnnnnnnnnnnnnnnnnnnnnnnnnnnnnnnnnnnnnnnnnnnnnnnnnnnnnnnnnnnnnnnnnnnnnnnnnnnnnnnnnnnnnnnnnnnnnnnnnnnnnnnnnnnnnnnnnnnnnnnnnnnnnnnnnnnnnnnnnnnnnnnnnnnnnnnnnnnnnnnnnnnnnnnnnnnnnnnnnnnnnnnnnnnnnnnnnnnnnnnnnnnnnnnnnnnnnnnnnnnnnnnnnnnnnnnnnnnnnnnnnnnnnnnnnnnnnnnnnnnnnnnnnnnnnnnnnnnnnnnnnnnnnnnnnnnnnnnnnnnnnnnnnnnnnnnnnnnnnnnnnnnnnnnnnnnnnnnnnnnnnnnnnnnnnnnnnnnnnnnnnnnnnnnnnnnnnnnnnnnnnnnnnnnnnnnnnnnnnnnnnnnnnnnnnnnnnnnnnnnnnnnnnnnnnnnnnnnnnnnnnnnnnnnnnnnnnnnnnnnnnnnnnnnnnnnnnnnnnnnnnnnnnnnnnnnnnnnnnnnnnnnnnnnnnnnnnnnnnnnnnnnnnnnnnnnnnnnnnnnnnnnnnnnnnnnnnnnnnnnnnnnnnnnnnnnnnnnnnnnnnnnnnnnnnnnnnnnnnnnnnnnnnnnnnnnnnnnnnnnnnnnnnnnnnnnnnnnnnnnnnnnnnnnnnnnnnnnnnnnnnnnnnnnnnnnnnnnnnnnnnnnnnnnnnnnnnnnnnnnnnnnnnnnnnnnnnnnnnnnnnnnnnnnnnnnnnnnnnnnnnnnnnnnnnnnnnnnnnnnnnnnnnnnnnnnnnnnnnnnnnnnnnnnnnnnnnnnnnnnnnnnnnnnnnnnnnnnnnnnnnnnnnnnnnnnnnnnnnnnnnnnnnnnnnnnnnnnnnnnnnnnnnnnnnnnnnnnnnnnnnnnnnnnnnnnnnnnnnnnnnnnnnnnnnnnnnnnnnnnnnnn

SEQ ID NO: 12 - DNA, 35574 bp, Artificial Sequence
  Scaffold 1913977
  misc_feature (1)..(2164): n is a, c, g, or t
  misc_feature (2183)..(2525): n is a, c, g, or t
  misc_feature (2905)..(3073): n is a, c, g, or t
  misc_feature (3301)..(3837): n is a, c, g, or t
  misc_feature (4206)..(4268): n is a, c, g, or t
  misc_feature (7649)..(7705): n is a, c, g, or t
  misc_feature (17556)..(17676): n is a, c, g, or t
  misc_feature (17873)..(17921): n is a, c, g, or t
  misc_feature (17933)..(17986): n is a, c, g, or t
  misc_feature (18239)..(18292): n is a, c, g, or t
  misc_feature (21370)..(21549): n is a, c, g, or t
  misc_feature (21586)..(21794): n is a, c, g, or t
  misc_feature (22227)..(22276): n is a, c, g, or t
  misc_feature (22367)..(22532): n is a, c, g, or t
  misc_feature (22706)..(23198): n is a, c, g, or t
  misc_feature (23284)..(23570): n is a, c, g, or t
  misc_feature (23921)..(24002): n is a, c, g, or t
  misc_feature (27604)..(27713): n is a, c, g, or t
  misc_feature (29576)..(29676): n is a, c, g, or t
  misc_feature (31997)..(32055): n is a, c, g, or t
  misc_feature (32118)..(32149): n is a, c, g, or t
  misc_feature (32557)..(32607): n is a, c, g, or t
  misc_feature (33025)..(35574): n is a, c, g, or t
nnnnnnnnnnnnnnnnnnnnnnnnnnnnnnnnnnnnnnnnnnnnnnnnnnnnnnnnnnnnnnnnnnnnnnnnnnnnnnnnnnnnnnnnnnnnnnnnnnnnnnnnnnnnnnnnnnnnnnnnnnnnnnnnnnnnnnnnnnnnnnnnnnnnnnnnnnnnnnnnnnnnnnnnnnnnnnnnnnnnnnnnnnnnnnnnnnnnnnnnnnnnnnnnnnnnnnnnnnnnnnnnnnnnnnnnnnnnnnnnnnnnnnnnnnnnnnnnnnnnnnnnnnnnnnnnnnnnnnnnnnnnnnnnnnnnnnnnnnnnnnnnnnnnnnnnnnnnnnnnnnnnnnnnnnnnnnnnnnnnnnnnnnnnnnnnnnnnnnnnnnnnnnnnnnnnnnnnnnnnnnnnnnnnnnnnnnnnnnnnnnnnnnnnnnnnnnnnnnnnnnnnnnnnnnnnnnnnnnnnnnnnnnnnnnnnnnnnnnnnnnnnnnnnnnnnnnnnnnnnnnnnnnnnnnnnnnnnnnnnnnnnnnnnnnnnnnnnnnnnnnnnnnnnnnnnnnnnnnnnnnnnnnnnnnnnnnnnnnnnnnnnnnnnnnnnnnnnnnnnnnnnnnnnnnnnnnnnnnnnnnnnnnnnnnnnnnnnnnnnnnnnnnnnnnnnnnnnnnnnnnnnnnnnnnnnnnnnnnnnnnnnnnnnnnnnnnnnnnnnnnnnnnnnnnnnnnnnnnnnnnnnnnnnnnnnnnnnnnnnnnnnnnnnnnnnnnnnnnnnnnnnnnnnnnnnnnnnnnnnnnnnnnnnnnnnnnnnnnnnnnnnnnnnnnnnnnnnnnnnnnnnnnnnnnnnnnnnnnnnnnnnnnnnnnnnnnnnnnnnnnnnnnnnnnnnnnnnnnnnnnnnnnnnnnnnnnnnnnnnnnnnnnnnnnnnnnnnnnnnnnnnnnnnnnnnnnnnnnnnnnnnnnnnnnnnnnnnnnnnnnnnnnnnnnnnnnnnnnnnnnnnnnnnnnnnnnnnnnnnnnnnnnnnnnnnnnnnnnnnnnnnnnnnnnnnnnnnnnnnnnnnnnnnnnnnnnnnnnnnnnnnnnnnnnnnnnnnnnnnnnnnnnnnnnnnnnnnnnnnnnnnnnnnnnnnnnnnnnnnnnnnnnnnnnnnnnnnnnnnnnnnnnnnnnnnnnnnnnnnnnnnnnnnnnnnnnnnnnnnnnnnnnnnnnnnnnnnnnnnnnnnnnnnnnnnnnnnnnnnnnnnnnnnnnnnnnnnnnnnnnnnnnnnnnnnnnnnnnnnnnnnnnnnnnnnnnnnnnnnnnnnnnnnnnnnnnnnnnnnnnnnnnnnnnnnnnnnnnnnnnnnnnnnnnnnnnnnnnnnnnnnnnnnnnnnnnnnnnnnnnnnnnnnnnnnnnnnnnnnnnnnnnnnnnnnnnnnnnnnnnnnnnnnnnnnnnnnnnnnnnnnnnnnnnnnnnnnnnnnnnnnnnnnnnnnnnnnnnnnnnnnnnnnnnnnnnnnnnnnnnnnnnnnnnnnnnnnnnnnnnnnnnnnnnnnnnnnnnnnnnnnnnnnnnnnnnnnnnnnnnnnnnnnnnnnnnnnnnnnnnnnnnnnnnnnnnnnnnnnnnnnnnnnnnnnnnnnnnnnnnnnnnnnnnnnnnnnnnnnnnnnnnnnnnnnnnnnnnnnnnnnnnnnnnnnnnnnnnnnnnnnnnnnnnnnnnnnnnnnnnnnnnnnnnnnnnnnnnnnnnnnnnnnnnnnnnnnnnnnnnnnnnnnnnnnnnnnnnnnnnnnnnnnnnnnnnnnnnnnnnnnnnnnnnnnnnnnnnnnnnnnnnnnnnnnnnnnnnnnnnnnnnnnnnnnnnnnnnnnnnnnnnnnnnnnnnnnnnnnnnnnnnnnnnnnnnnnnnnnnnnnnnnnnnnnnnnnnnnnnnnnnnnnnnnnnnnnnnnnnnnnnnnnnnnnnnnnnnnnnnnnnnnnnnnnnnnnnnnnnnnnnnnnnnnnnnnnnnnnnnnnnnnnnnnnnnnnnnnnnnnnnnnnnnnnnnnnnnnnnnnnnnnnnnnnnnnnnnnnnnnnnnnnnnnnnnnnnnnnnnnnnnnnnnnnnnnnnnnnnnnnnnnnnnnnnnnnnnnnnnnnnnnnnnnnnnnnnnnnnnnnnnnnnnnnnnnnnnnnnnnnnnnnnnnnnnnnnnnnnnnnnnnnnnnnnnnnnnnnnnnnnnnnnnnnnnnnnnnnnnnnggtcggtgagggccaccannnnnnnnnnnnnnnnnnnnnnnnnnnnnnnnnnnnnnnnnnnnnnnnnnnnnnnnnnnnnnnnnnnnnnnnnnnnnnnnnnnnnnnnnnnnnnnnnnnnnnnnnnnnnnnnnnnnnnnnnnnnnnnnnnnnnnnnnnnnnnnnnnnnnnnnnnnnnnnnnnnnnnnnnnnnnnnnnnnnnnnnnnnnnnnnnnnnnnnnnnnnnnnnnnnnnnnnnnnnnnnnnnnnnnnnnnnnnnnnnnnnnnnnnnnnnnnnnnnnnnnnnnnnnnnnnnnnnnnnnnnnnnnnnnnnnnnnnnnnnnnnnnnnnnnnnnnnnnnnnnnnnnnnnnnnnnnnnnnnnnngcccggcccatgttgtttcttaatctgatcagcgggaggtaaacgacccctcatggccagtccatctttttctcctgtttctcttcattgtttttccctggctcacataacacccgccagttgttcgacgacctgcctgaagagctccgccggcacgtgttgtcccttctgcctccaggtcatgccatgcagaccttcgtgctcgacacctagtggtgtgaccattggaggcgcaccactgacctgctcctcttcttcgacgagttgagtttcatgagctgccagcgtttcaaacagctggtcaagctcttcatccagctctgagggaactcatttctcgacaaagtttgagatcagtgcatatgtggatggtgagaagnnnnnnnnnnnnnnnnnnnnnnnnnnnnnnnnnnnnnnnnnnnnnnnnnnnnnnnnnnnnnnnnnnnnnnnnnnnnnnnnnnnnnnnnnnnnnnnnnnnnnnnnnnnnnnnnnnnnnnnnnnnnnnnnnnnnnnnnnnnnnnnnnnnnnnnnnnnnnnnnnnnnnnnnncgaagagcatgacgggcgttcgatcaagttttggtttgattcttgggtgtagactaccaggacctatacgccttagtagtagaaccgaacgctactgtagcagaggtgctcagatcgtctcccccggtcattcctctccgccgtgagctaagtgctccagaacgggttagttgggaattgctgctgtagaaactggatccatttgccttgtgtgcaggcccggactcnnnnnnnnnnnnnnnnnnnnnnnnnnnnnnnnnnnnnnnnnnnnnnnnnnnnnnnnnnnnnnnnnnnnnnnnnnnnnnnnnnnnnnnnnnnnnnnnnnnnnnnnnnnnnnnnnnnnnnnnnnnnnnnnnnnnnnnnnnnnnnnnnnnnnnnnnnnnnnnnnnnnnnnnnnnnnnnnnnnnnnnnnnnnnnnnnnnnnnnnnnnnnnnnnnnnnnnnnnnnnnnnnnnnnnnnnnnnnnnnnnnnnnnnnnnnnnnnnnnnnnnnnnnnnnnnnnnnnnnnnnnnnnnnnnnnnnnnnnnnnnnnnnnnnnnnnnnnnnnnnnnnnnnnnnnnnnnnnnnnnnnnnnnnnnnnnnnnnnnnnnnnnnnnnnnnnnnnnnnnnnnnnnnnnnnnnnnnnnnnnnnnnnnnnnnnnnnnnnnnnnnnnnnnnnnnnnnnnnnnnnnnnnnnnnnnnnnnnnnnnnnnnnnnnnnnnnnnnnnnnnnnnnnnnnnnnnnnnnnnnnnnnnnnnnnnnnnnnnnnnnnnnnnnnnnnnnnnntttgtttcagcaagctacgctaggatttcgtcacgtctagaacttggctagggagcctcaagttgtttcttagggaaggtgacgtcttttgggttggaatgctgctacacaaacaaccagttctggatgatttgaagacgatgcagcgcatcaagccatcgatgcgtgaaacaaaagtgaagtgcgccgttgaatcctctaatagtccaaagttcgtccggtgacagtcgtccgtacaacaatttcgtttgcgttgagcctacattctctgtttggacctttggtcgtgtaatggatttcctttttggtccgagaacttggtgtgtcttgtgtctggaccttgtggctgtgttgatctatgtgttttannnnnnnnnnnnnnnnnnnnnnnnnnnnnnnnnnnnnnnnnnnnnnnnnnnnnnnnnnnnnnnaaaaggaggagtgcacatacataaacaccatcatgttgatcgagtatgctctcaggtaccaagctaaagattttcgagttagtgatggtacgttgtggaaccaccaacactcgatgcgcctctcatctctcagcaattgaagaccatagacctttaccaggtttacctacaaagccccactctgaatttctcgtgctgtccgccatttagaacacctaaagatacgacattgcaacattgatgcacgcatgatatcttccaaatcactttagtgtttgcgcatcacctaattttgtatcttctctttgaagttccacgttcggatttctgcgccgggtcttatctcgctgcaatatgatgattttacatcgaaagaaaagtacaatgccaaataagtcgccgacacaacaccaaaaatggtactgcctgaaagataaaacataacctaaacaacaacaaaaacgaactaatgattcatggcacatgggtgaacgacctagacataatactagaaacccaagcaagaacaagcaggggccacccacatgcatgaaagcatttgccatacaccaaaggagttgcaatatctcagacgaacgaccatgaaagtagaagcgcaagtcctccatattggcatcaaccaccaacacaaactaaagccacttgcacaagcatgggtgccagaacgaagaagtatgtaaaatcattttgagcattgctccaccgcaggggtgaagacgaccataggagtgccacacagcccaccaagcactcgcaccatcatgtacacgatctagccatctagagaaggggaatgatgatccagagggcagagatcaacctagtggtatggcacagaagccaatgtttggtaagaggactgtccatgtccaaaataacaagcggtcccagccaactccagaacgacgaggtgactggaggagggcatgccagatcacaattgaggggtaggaggagtgctagctccgatggtgagagcctgaatctggctgaggatgaccaaggaaggggtgtggagcaccgtacaccacaatgaggccaccgactagtagcgaccgtgggtgatggagcgtcatatccaatggcaggtatgccagaccaggccaagaaatgaccaaatcttaagttgaagaaccacaaagaccggggcatctagactgcggtggcctgggatgggatgaccaagggaagccggactatcagacaactaggagaaggatatggtgagcatcataccatgacaaaatcgatcgccggcagccaccagcaaaggaggggatgataattagttcttggaaactgtatatgctggttgtaattagcagaacatgtacaagaaaaaatggattatgattaccagttatatatgtgcttcacttgacaataccgataagatcctattaacacaagagtttgtttcttgatttccatatggattttgaacaatactataatgaaatcatgttcaaagagtgaagatttgaggaggcaaagtagctgaaatagaaatgctgacattttgtttttctcgttcaccggtaacccgcaccagtttgaacaacggagtgaagtataaatactcaacatagacaactttttggtgttagctcaagctttgaaggcgaactagatggcccaatttaatatgcgtgtcctagctcgatggcactgaacacatgcaaaaaaaaagtgctccaccgattcacttgcattaacaattcttttgccttacaaataagggtacaacctcaccagagtagatatcacgttacgttgtttcactttgttccagcttgttggtagtagctagcttactagtcccataaaacaatggaattgttttgcaagaaaagaacaaaggagttgaaaattcatgtgggggataggaggtgtcagtaacatgcgcaagatcgagcaactctgcccccttcaccattcttgcaattgaccgtgccggcaatggcgcctgtgacagtgcctctacttggcaactcgccaccagtgaccccgtacgctccatcttcaatctgctcattcacgatggagtttgtcggactctatgaatccagctgagccatcagttagttgtgtcttttgccgtggaagagaaacatgctgtcgaacaccagctgcggcccgcgacatggccagacctggtggttgggtgtacgataaatattgataaacttaaaattgatacagtgtttgtttcgattggcttggcaagggtgtataatttggctttgcaagaatgcagtacaaaataatttggcttggcagggctgtatgtagtacaaagtaaaagtaaggaaagtaatctagtggttggttgttctccagctttaagaatgatatagagtttgcttcgattctcgttagtgtgcgtaaaactttgggacatagggttgagggggtgtgggtttgaatattcacaaaactgatatacctttcacaaatgagatgtggtctagcgtaaaggaaaatgactagaaagacaatagcgtgccaacttggcgtcaagtaatacaattatcaatagttttgtcgtggttgattatgaacaccaaatgtaagtatcctaactgtctctacaaatgtttacttcgttgttgcaacatatcttatttgcaagtactataatgtttctttttcaacaactactatacaattgaatgtagaagagttgttttctgttgttggaagggtgtgtgtagtgatttaggacgtcaatagccagcgaacatttgctgggatgggttgcatttttgaacatttttgttggcagttttttcataaacacatgacattttcttcagaacaacatcatagatcttcgtaggaaggtattttcttctaaaaaatgccaccgttcgatctagcaacgcaattgtcaacaaaatgcgtttgtttgccatcccttaccagggaatgtctgccaaataacattttcgatgatttgtaataactcctttttccaaagagacagaagaaacaacaataaattcccacaaataaaagaaacataaaaaacatttgtatctcgatttatatggttattgcagttttggtctttagtccaatgtcacaacaatgttgtttgcaaaatggttgttcttctaaaccgtcatacgtataccccgaatttccttgattccagttaagtgatttatactcgtgaaggacaaaggagaaaactatgggaaaatttattactacgcaataaatgctatccattttttttaattagatatgaagataggtagtactcaaaagataagagagatcagccattttaaatacgggaaataaataaatggataccgcatatatggaaaagaagctcgcatttattacatgatnnnnnnnnnnnnnnnnnnnnnnnnnnnnnnnnnnnnnnnnnnnnnnnnnnnnnnnnntcaaccgactataacatcccacgccagtagaaaggagatagaacaatcggcgaagctccacgaacgagactgtcatttgcggcggataccagaagatgcatcccatctaggtacgcggatgccccgagatcttcgtccatttcgacatcctccttcccttttatggcaccgattttctacctaaacgctctgaaattcagatccctgtataccaagtatgtgtcgtggttgatggattttggggacggtttttgttggtggtttgggcagcgatctgaccgtcgctgcgtggaactgacggctaggattcgacgtgggaacccatctcaaatcgggggtgggggctactagtagtagtacagcgtgcttcctcccctcttgtcttcctcctcacgagtcacccgtgaagcaaaccgtccgcccccggattcaccccgtgacgccggcgccgtcggaacccctcctccgccgtctaccggccggcggttcccccagatctgccgtcttggagatcggccccatccccgtcgcttcacggtgggcgttactaagcccgaaatcgcgttcttggtttctattttcagttcacgagtgtcgaaccatccggcgacggtgatctgagattgtttcgttgtaatttgttaggaagcttaattaggtaggcgtagtggacggtgatgttcatcctagtgtgctaccaagctggaatttcgcttctgaatttctgattcaccggtgttttgctcacccttttccagcaggaacagggcactccgtctgaactgaagcacctgtgctatctttggcaataaaggggtcacaaaaatctcccagctgatcttccctggtggtgccgcaacgacgatgaggacacatgagcgtgctgcgaacttggcccttgctggtgtgttcatttcttgaaaattcagttatcaacctgcctgtggcctgatttgctaattcgtttgtagtcctcattcatgtgttttatgacattgtgcaggtttgagcttggcgccgctggtgatcaatgtgaacccaaacctgaatgtgatactcacagcgtgtcttactgtctatgtgggttgttaccggtctgtcaaggcgactccaccctctgtgagcaacatgtccctctctatctattctgtcaatgttaagttgttaacctaggttgacactaaattcttgcatatggctctgattaactctttccatttcttcttatgtaggagaccatgtccaaggagcatgcgatgcggtaccctttggtggggagtgctatgcttctgtctctgttcctgctcttcaagttcctctccaaggacctggtcaatgctgttctcaccgcctactttttcgttcttggcatcgccgctctctggtaattccaagggttcacacaagagattttcggaagacgtaaatatttagaagtgtaaacgtgaacttacaaacatttatttttgccctgcttgattatccagtgcaacgttgcttccttccataaagcgttttcttccagaagggtggaatgataatgccatcatttggcgtgctccgtatttccactgtatgatccccaccttcattttgtttgatgctcgcttgctttgtgctctacacatcctgaagctcatgccagattatagtatacagcaaaattccaattactagtttgctatcctcacggactatatattatatttcatttctagtatttctaagttgccatatacggagtatatactttacaatagtaatgtgctaatctaccgacatattgagtatcctaccttacacagattgcaataaaattcagcagttatgcatttgtaatccagtagttcattttagaggggaactaagaaactgtctgtactgtattgtggcaacatgatgttgctcagttgctctgcaaaaaagtggggtaattaactaccatataaacatacattttttgcgtaaatgttttcatttgacatggtgtgttatttttcttggtatactggagtctggttacatttgcaacatttgcgatgctttggttgcttcttatggaataatatgactcttgtcttgagtttttattaactaaatccttcccaagcagttgcgccttcttgatgatattacaagttgagaatttattcctgctattttcctttacaagcttgactcttgatgatgatttattgttatgaacatttcagcactctcagtggagtttaccaagtctcaagttgttgcttcaatcccaggatttttcttttgcgtttggtatgccatgaagaagcattggctagccaacaatgttttgggagttgcattctgtattcaggtgtgtccttacttctagagtttaaggttaatatgccttgctagaataattatgggctgaagtcttcataaacatgatctgttttcctctgttttttacttgctcaaacttaatacgttagttcttaccttgcagggaattgagatgctatcactaggatcgttcaaaactggcggtattctcttggtatgcgtcactcaaagtttgtaacgagctgaaacttatgtattcctattttgtgctgttcttgtttcggccacctacatatctttctcttcctcacctctctgctatcataatccttacttcatcgagcatgacatatatgtacaataaatacaatttggataaaatggcatgacatgtataaaggatagatacaatttgaagtagctgatattctagaatttttgctagcctttcttttcgccatgtttctagaaaagcaatgttatgcagtgcttgctggccgtgttgacgatctgcagtttgcatctcttgattggacttaccatcgtaacaaattttctagcagctcactaaatgcatagcagtgttcttgtccttgttttcatgatttgtttgtatcatagaatcggctttcagtcaattacttttactgtggtgatattctgaatgactgttctcgattttggttccgtacttcagcaaaattggttcccactgttggtatggtattggcaagctaactatccacgattgccttttttagtatgtagtgatgtagtctgcgctgtactcatcctctggcaagtagtgctgaattgtgatcctactatctcatgattcaacttgtttactactttactgatatccacagcttttccaatttttgtttgtgcatgccttataaaaatgttagtttcagtcatttcgtcagtcctgttgctgcagtcccacgtactgtcactgaatccttctcttattgttgcttgatatttccttgtgaatgtctgctcaatgtcctcatcaatttcaggctggactttttttctatgacatcttctgggttttcttcactccagttatggtcagtgttgctaaatcatttgatgccccaataaaggttagtagtgctttctctcagtgtattcactcttttatccccaacattgtttccattttattacggatactttagttcatctattttttcctcctatttgtagcttctatttcccaccgcagatgctgcgcgcccattctctatgcttggccttggtgatattgtaataccaggttagtgataaacctgttggctagttttttctcatgttctagtgatatttgcagtgatactggattgtttttctggtttgtgatttcatagtaatgccagccacattatgagtgacaactctgttctaatgatccatggcgagctgctggtctaactgtcataacaacagggtttctgttgataaaaaggatgtttattctattttattgttgtggataggagattcagcattttttgtaaaaacagaaaagcaacaattacctgttcagactttggtgacatgctaggctgttgtaattccatcacatgactggttccatgttcaattcaattagcaattgcaaataaaactatttttcgctatcttagtgcattattcctgtgtcgttcgttgccaatacaaccaatatatgctcctggcctgatatcaggattgtaggtatgcagtaacaccagaaagtaattatgattggactacttccagttgcacgcaaaaaatgccaactgagttgtggtgtttctcagatggagacaaccaaacttagcttgaaactactatgttgtataatgacgatgtatgcttttttcagttgttgattcttgctttttgtagatcctaataactagactgaatcagatgtttaacatggatgctcagacaattgatgcagtagactcatataatatctgttcccagtgatgagtttgtggattcttgtatttcccagggatgtgtttggttggtgaaaatgttttgttgaaacgatgcattataaactcataatatcagttcagtataaccaaaataagaaggggttttttatttgtttttcctaagcagttctccattattcaatactgaaaacacatgcagggccctcccatgtttccgtaagcatgtaagctcttaacgcataaatgtacatctatatttatataattctgattgcaggcatcttcgtcgcgctcgccctgcgtttcgacgtctcgcgagggatcaagagccgtggttacttcaacagcgcgtttctgggatacacagcgggtttgacagtaacgatagctgtgatgaactggttccgagccgcgcaggtcagttctattgctattaacatatcttgtcatcttgtcgctctctatatcccctagtctctggaatattattacctattttgtttccgatgatgcagcctgctctgttatacatcgttcctggcgtgattggtttcgtcgctgcgcactgtctatggaacggggaagtaaagccggtaattacacttgttcacctctgatgatcagattttttttgtttcctcatttcccatgttcttctttgtttcatcttgtgtctgatcatatcataggtataattcactgtcaaaactgcgaggcttgtttgtttctgactgttttacattgccagctgctggagttcaccgaggcgcaggatgaagagaaggaagaaggtggagatcccaatcatgagagcaaaaaggcaaactagcgctcaatctagcctcgctcggatccttttagttaggagaagatagccaaaggaggagtttcaataggccggatgatctcaagaaccgagaaatccgttctcatcatagaacctctttttttcgacaattaatctctatttggttgtcaagatggtaaaagggaacatagtttaaagggatttgcaacagcatccagttcagtgaaatggacatgagtacatggctttacctgctgccatccagcattctgttttctcacaccgacttgttcgtgatgctggcatcaaggaattatttggtccttattacatcctatattcggtgacattttctagattcctctgccaaatttctcggaagtatgtatgtattccagttggatcatcatcagtaaacttgggttgcatcacaaagaatatttacttctgtatcaagggcagatttgtctgccaaagcatgtcgtgttgtgaagcaaatctgactgccgaggttgctggcatttctgcctttcccgcaccgaaatcatcggctggtgcactgaacacatcgacgacattggttccaaaccccgctgaaaaaacacctccggcactgtaacacgcactggccgacgcaaccattctcctctttaagatttctcttcttgccatatcatgccattctttggtgaggtcgtccatgtcattgtggttcattgtcatgatcttgttctcttcagcgagcaacatggacatggctttgttctcagcggcacatactcttctctcctcaatggccgctttgcgcagcccctcttccttgagcaattgccatttctcttgcttcttcttctcggccaagtctttcttgatctccaacgtcttcaataacatcaactcatttgattgcaccatggcatcaatcttctccctcaagctcgacgcttcgtgctctctcttcattttccccttagtcttcttgtcgccatcgggcttgttcaagtttcttgggccatcattatcctcatcttcgtccatgtttgtaagtgaacctctcttcggtggggattctttgtcaatcaacttccacttctcgcacttcttgggcaagtcccaacaatgctctagtttgaagaatttgccttccgaagcttccatgtctttgtatctttgttgggcaattttgtcctacacaatttgaatgatgcaatcattttcatatgatgcaatatgatgtgcacaaattgaacaaagtcaaaatgaactcacatagtccgattccatagtttcacttggaggtgcattgcatacttgctccaagcaagctgtccaacggctggaaataggcttgatcacgtcccaacgcccttggagcgaccgaaaggtgcgaggagtcctattgggatattttgccatcatgcggaagtattgatcttcgatcctttgccaatacctcttggcggttttgagaagtacccgtgcatgcatcaagaaacactgcactccattccttgatcaagatttgatcttccaagattgtgtagttcttcgatctctgactatttccacttcttgtttgtgattgctcatacgccccctcatcgatctcctccacttcttcttcacccccatgatcatacgcgccgccctcagtttcattgtaatcaaatgcaacaaacgtggcttcatcgatgtcaacggcattggtgtccaacaagttcacggactcggcagttgcattgttcgaaccaccgctgtagtgaacgacaacaagtcacgagctaccgccaaagcaaagaaaatttccatgaccgaagaggcataccttctgaccatttggtcgaacctcgcttgcggtgggagcagcaccgttgagcggcatcgccgggaacctctttccggggcggagagagtggatgaaggactcggcttctttatagacggaatcctcttccgctttacgccgcaggccttgccgaccttctccgtcactggctgggatcgcgcagcggcgttggggcccagagcgcgggccttcctggtgggggcaaccggattcccgccttgcacgaccacgttgccctgccgcttgcggacaggcgcagtggtgccttgggcgacggcggggccaacatggccggagacgagatccacccgaggggattgagcgtgcgcgacctcgacggtgacgggggacagcaaggtgtcatccatggcggcgaaggactgccgtggaagatgcaccgaagcgggagatggcgggggcaatggtggtggaggcactacgggagaaaacttataagccgtgtaaaagactataagccgagatctatttttcgggtacccgacatacgttacactaagccgagtcaagaaagaaaaacacccgacaactgcaaaacacccagcttctagcaacctataagccgagctatacaaaaaagctcacggtttaaagtaagctcacaatatctactagaaaaggcactcggcttactgcttgcggtcggcaaagataccagccacgtgtcgataatagagatagtggacggcgtcgtcacggagcatccaaaaagccgtgtgccagatgggtgcactcggcttataggctatataagccgtgtgccagatgggtgcactcaggttataggctatataagccgtgtgtcgatgggtacactcggcttatagagtatataagccgtgcgctaggccgcaaaacttggcttatattgtagataagccgtgtaccatatgagagcagtaagcttatatttatgcaaaattggtttaaacaattttccattgtatttatttttgctgcttaattattatttctccctcacccacttttccctaaatagttttcatgggtcatattttcgatgcccttgatataccggtggttgggcatgcctctccgtcgtctgcctcctttgagatcacgagaagtttcaaggccaacatagaagttccagtggttgggccattcgatgacgccatgatagctcccgaggattttcggcatcatacgactttctaaggattcaaacggttggatcaggcatgctgtcgaggtaatttcgcactaccaatggctgggcacgcccctttcttgactgtacatggcatatgcatgttgcaaatacatcacatatgattttccatgccgcttctgggcatgatgtcatgtgccgccttgcggatctgcaatttccggtgttgaaaccctaaaagtgcaataaatgtctcaaatattgcaggcgcgtccgaaaaatgcgggggcctggtacgcatcattcgatggcctcctttgagagcacgagtattttcgaggccaacggagcaacatgtcccgcaattccttcacgaacccgagacgttctctctcgataccgacagactacctcgaaaatggtgcagtttacaagcggcctcgggcgaagcctataagaaatgcgcctaaacttttaccacatcctacatggaccattcaatgacgccgtgacaactctcgaggatttccggcatcatacgactttccaaggattcaaacagttggatcaggcatgccgccgaggtaatttcacactaccaatggctgggcatgcccctctgtcgtctgcacatggcatacacatgtcgcaaatacatcacatatgatttcccatgccgcttctaggcatgatttcctgtactggcttgcagatctacaatttccggcgctgaaacactacaagtgcaataaatgtctcaaatatagcgggctggtccgaaaaatgcgggggcctggcacgtgtcattcgatggcctcctttgagagcacgagaagtttcgaggccaacggagtaacatgtcctgcagttccttcacaaacccgagatgttctctctcgataccgagagactacatcggagatggtgcagtttacaagcggcctcaggtgaggcctataagaaacacgcccaaacttttaccacaccctacgcagaccatttgatgacgccgtgacagctcccgaggatttccggcatcattcaattttccgaggattcaaatggttggatcaggcatgccaccgaggtaatttcacactaccaatggtgggcatgcccatctctcgtttgcacatggcatacgtatgtggcaaatacataacatatgatttcccatgccgcttctgggcatgatttcatgtatccccttgtagatctgcaatttccggcgctgaaactctagaagtgcaataaatgtcgcaaatattgcaggcgggtccgaaaaatgcgggggcctggcacatgtcattcgatggcctcctttgagagcacgagaagtttgaggccaatagagcaacatggcccgcaattccttcacaaacccaagacgttctctctcgataccgagagactacctcggagatggtgcagtttacaagcggcctcaggtgaggcctacaagaaacgcactcaaaattttaccacaccctacatggacaattcggtgacgccatgatagctcctgaggatttccggcatcatacgattttccgaggattcaaacaattggatcaggcatgccgccgaggtaatttcgcaccactgatggctaggcatgtccctctctcttctgcatgtggaatacgaatgtcgcaaatacatcacataggatcgtggggcagtttacgttcaaacctcttccgagtccggtcgaagacatagaccgtgcgggccctatggatgggtaaaatcttcgaaaacatagagacnnnnnnnnnnnnnnnnnnnnnnnnnnnnnnnnnnnnnnnnnnnnnnnnnnnnnnnnnnnnnnnnnnnnnnnnnnnnnnnnnnnnnnnnnnnnnnnnnnnnnnnnnnnnnnnnnnnnnnnnngtgtaaaccgtgtaatctgttgtgacactcggcttaccctctgctctaggcttagttgtgagcgcgggacttagccaaaaaagacgcgcgtagagctcattttgccccaaattgaccgcggctaggctctgttttccccctcctctgattcctcccagcgccgccccccatcacttcctcagcgccgccccctgaannnnnnnnnnnnnnnnnnnnnnnnnnnnnnnnnnnnnnnnnnnnnnnnncagcgacgcccnnnnnnnnnnnnnnnnnnnnnnnnnnnnnnnnnnnnnnnnnnnnnnnnnnnnnnatcacttgccccgcgccaccccttgaatcctccgccgcaccaccactcacctcgcgccgccgcccatcctccacccaccggcggcgtcgctgtcacccaccggcgccgcgccctcctccacttcagtagagtctactagatccgcccccaccatgagcgccgctgagctggcccttccatcagcgccgccgcccctcccgggactgctagggttgaggtcgccacgccatcttccctccgctggcaggtaccnnnnnnnnnnnnnnnnnnnnnnnnnnnnnnnnnnnnnnnnnnnnnnnnnnnnnngaccgtcctatttcttctctcctcagcaggtccggctgctccggcggcaaggtgtcccctcctcgtttgcaacaacaactgcaggcaggtcttggttccctccctcccccaattgcatcttcagggagtcgagaagaaacaacagcaggtcttggttccccctctcccccaacaacagcaggcagattgatttttcttctctgaaccttctcgaatgatggaatctcagattcatatatccctacaaattacaaaccttctcatcttgcccaaaaaaattgtatgcatgtccgctgatgtgcatggtcaaaaattgtatgcatgtcccctcatctcagattcatatgtctagttcagacaagcacttcaatagtttgcaaatttattagccatgtgcatggtcagaaattaggcatgtgcatggtcagaaattaaagtttctttataatattgtatttgtatttcgttaaatatcaaactgatttgaaattcagtttggtctcagtacataccaaattattcctatttggtttcagtatatgccacattaacaagaattgacgtgaatccaagaacgagacgaccacattttacctttgtccatgtgttaaaattatatttttagcattttaattttatgaagtgaataatatagtcaatgtgggcattcttggagcagtatagaactaaagggatgcacaaatgggcaaccttcaaggcctgtacagaagttcagtgacatgaatatttcctcgatgcatgattttataatttgctatatgcgtttgagattaggcttttgtattttcttttgagaaaaaggggaaaagagacgaagctaataaaaaatgatctctgatatctgtattgatttctattattttttgaaaaacgagaagtcaaattgtttttgttcttgattctgtgaggctctatcattatatctgtctaatggcaaatttcttaatctctctagagactggtcggaatagagtgtggccctgttgcttcttggtatcattactagcaagtgtcatgtcacttttacccatgctctttacaaacagaattacccctcaaacgagctctggataccaaagacaagtgggacagggtgtattgtagtgccgctgagcgggtggtcaatgattttgggtaaaattcttttcaattttcatagttatttctttgccaatctttaaaatcattgaactaataactgttttatcctcttatgctctttggcaggacttctttacttgcgccgagggtatgaaggatgaagctaatgaggttgtggaggcgattgccaagaagattgtccaagacatgtcctatgaggcgcgtgttgatgctgtggtgaagtatttcttgcaggaacgcaaaatgcttctcaaaaagtctctagcccggagagtgcatctcacccattccatgtacatgaaggtagtttccttttacttatgattgcctggatcaaaacaacttactttcattcctaagttggatgtatttggcatacttcaggcggttccctcgtggtgcaacaacaatgttccttgctaccagcaaatcatatccaaatggatagacccggagtgaagggcccaacatcgaatggcttcggagcggcgtgtcttgatgggtggtccggtacaccttcaaggcaacctcaacctccacgcttacgtgcagaagaaggtaataatatcattcggcttctcaacttctaaacttgtgcttttatggatattattgcttctattgcagaatagggagagaggtgagggccaagagaagctcaatatcttcacgggattatgtctctcccgccagtcaaagaaaccggaaggggggtgggtcaacccaggcgttggcttgaggattgatgcatacagtgggaagttcaaggagcacaatgggcctgactctgatccagcctcacaggacactgacgctacaatttccctccagtcgggagatggcaagaagggtggtcggttatatgttggcgacggtgccattcgtaagaaggacatcccaaaactctctcacctacgtgctaccacgtcgagctcaggtccttctatagagcatcgcccacagcctgggctgcacatgctccatcaactcgaggtatcttttgcttcatcgaccttccttgtgatttcttctttgtattgcaacgatggtgaacttgttgtgatggcatattgtaggccaatgccaggcttcaagaggagcaagccatgaaaatgcagcaggccctgtttcaacagcaagaattcatggttaaacaacaggcaatcctgcaggagacatttgctcaactcagaaataatatgcagggttccactttgcccgttcttcctcctcttccgactcttcctaatttcaactttgtaagtctttgaacttttcaatcatgcatcttatcctctcgtgcttcaagttttttgagttgggacaaggctccaataactgtgtggtaggtggatcttcacctggccaagcaagtctagtgacacccactacggttcatgtcgcttcgacctcccgcaacaatgatcacttgaggtagtcgtccatgtttgtccattgttgatgcttgcgtcttctcgttgcttatgcttctcaacttaaaacttgtgcattgttgatggtaaagtccacaagtgttgatgcttatattgtacatacttcctagcttctatttgagcctcatatgttgatgcctgttgactcttttgccttatccatctttgcaacttaactttagaaactcatgcgtgtgataatggacttataggtttgcattgtggatggcgttgacggtgggcatatatgctgtggtcgagctcattgcatggttcatgcttggtgtgcacttggaactcatgatcctttaatttgtgaacctctggttgcagatgtatgtatgttgttgtgaatcttcgttggatatgtatgcactgtgtggacttgaaacttacggtccttccgtttgtgatcttttgctgcatcgtatgcatatgtggactttgcactcatgtacggctggatatatgtattactggnnnnnnnnnnnnnnnnnnnnnnnnnnnnnnnnnnnnnnnnnnnnnnnnnnnnnnnnnnnnnnnnnnnnnnnnnnnnnnnnnnnnnnnnnnnnnnnnnnnnnnnnnnnnnnnnnnnnnnnnnnnnnnnnnnnnnnnnnnnnnnnnnnnnnnnnnnnnnnnnnnnnnnnnnnnnnnnnnnnnccacccggcttataagccatatagctgcggccaactnnnnnnnnnnnnnnnnnnnnnnnnnnnnnnnnnnnnnnnnnnnnnnnnnnnnnnnnnnnnnnnnnnnnnnnnnnnnnnnnnnnnnnnnnnnnnnnnnnnnnnnnnnnnnnnnnnnnnnnnnnnnnnnnnnnnnnnnnnnnnnnnnnnnnnnnnnnnnnnnnnnnnnnnnnnnnnnnnnnnnnnnnnnnnnnnnnnnnnnnnnnnnnnnntatgtatataaaaaccgtgctgttgtcgacggaactcggcttatatagtaaccgtgcggttcgcggttgcacccggcttatatataaaccatgggttcgcggtcgcacccgacttatatataaaccgtgcgtccgtggttgcactcggcttatatataaaccatacgtactgaggtgcactcggtttatgtttaaaccgtgccctgacgacggcactcgacttatatagacggtgacacgtggccgttaacatcaagctaccgtcatgttactttattaaaccgagagcctggtgaaaatactcggtttatacataagccgggctttttcggtccggctctcggcttatatggtataagccggtcgactgtaaaccgagtggtataagccgggagttttactcggcttatatataaaccgagtttaaatcgannnnnnnnnnnnnnnnnnnnnnnnnnnnnnnnnnnnnnnnnnnnnnnnnnagggtgggggtagcgggaacggccgcgcagaaatatccctcccgccaaatctcgctgaggataggggccgagctcgggtcgtcctcccacnnnnnnnnnnnnnnnnnnnnnnnnnnnnnnnnnnnnnnnnnnnnnnnnnnnnnnnnnnnnnnnnnnnnnnnnnnnnnnnnnnnnnnnnnnnnnnnnnnnnnnnnnnnnnnnnnnnnnnnnnnnnnnnnnnnnnnnnnnnnnnnnnnnnnnnnnnnnnnnnnnnnnnttaaaggcaaagaaaaatgtgccattcgataaaagtcacgtgaaatgtgtgacgttttatcaaactctagaaaaatgaacgtataggtttgcagttattctatgaactgtcctgtgagcaaggccgccgctgccaccaccacatgtcgcgtgcagagcgttcctttgagggttnnnnnnnnnnnnnnnnnnnnnnnnnnnnnnnnnnnnnnnnnnnnnnnnnnnnnnnnnnnnnnnnnnnnnnnnnnnnnnnnnnnnnnnnnnnnnnnnnnnnnnnnnnnnnnnnnnnnnnnnnnnnnnnnnnnnnnnnnnnnnnnnnnnnnnnnnnnnnnnnnnnnnnnnnnnnnnnnnnnnnnnnnnnnnnnnnnnnnnnnnnnnnnnnnnnnnnnnnnnnnnnnnnnnnnnnnnnnnnnnnnnnnnnnnnnnnnnnnnnnnnnnnnnnnnnnnnnnnnnnnnnnnnnnnnnnnnnnnnnnnnnnnnnnnnnnnnnnnnnnnnnnnnnnnnnnnnnnnnnnnnnnnnnnnnnnnnnnnnnnnnnnnnnnnnnnnnnnnnnnnnnnnnnnnnnnnnnnnnnnnnnnnnnnnnnnnnnnnnnnnnnnnnnnnnnnnnnnnnnnnnnnnnnnnnnnnnnnnnnnnnnnnnnnnnnnnnnnnnnnnnnnnnnnnnnnnttgtgcctcttcagaaatggaaaatagtggggggaaaccgtgcttttggctcggttttttccgctgaaaaaaatagcgcgctctannnnnnnnnnnnnnnnnnnnnnnnnnnnnnnnnnnnnnnnnnnnnnnnnnnnnnnnnnnnnnnnnnnnnnnnnnnnnnnnnnnnnnnnnnnnnnnnnnnnnnnnnnnnnnnnnnnnnnnnnnnnnnnnnnnnnnnnnnnnnnnnnnnnnnnnnnnnnnnnnnnnnnnnnnnnnnnnnnnnnnnnnnnnnnnnnnnnnnnnnnnnnnnnnnnnnnnnnnnnnnnnnnnnnnnnnnnnnnnnnnnnnnnnnnnnnnnnnnnnnnnnnnnnnnnnnnnnnnnnnnnnnnngggaaaacacacatgttacaccttaatcagtgatttcgactgtccctatacccattggtggagctacagtaaggccgaatggccatggccggcgcagcccataaaaatttgcatattacatctactcatgggcctttaaacaacgctccatactgtattattcaaaacaataaggtgtgcatcaaaggggctatttgaactatgccacgttggatcgctagcagacaaagagagatcgctgggagaaaaaagatcctgattggcagcggctagtgcgagccaatgacgcctcctcgcacgttccacgtccgcagaggctttccaccccgactggcgcggctagggttgctnnnnnnnnnnnnnnnnnnnnnnnnnnnnnnnnnnnnnnnnnnnnnnnnnnnnnnnnnnnnnnnnnnnnnnnnnnnnnnnnnncacaacccctctgccccgttctggtccgaacttcgtcgctggcctcgtggaatcctcgaatctttcggtggttagcgagcgatgcggaaaagcaatgtcgtgtcgtcaccgtgatgggttggatggccggcgccgcagagctccggttcgacgaggtcgtcggcgacgcgctgcgggagcgggatctgctccgggcagcagcatggttggtggagcggtgtatgcgggcggggacgtcagttgagggaggctggccggctggagcggcaggagcagtacaggatgatatacgcacaatctactgaccgattgaatcccgaggcccctagatagacaaaaaggtgaatttatctgtttctctgttctgcattttttatgtgttcatagctggtctgctctccatactccagcatggaggcagtagaatgagtgaaatactttgcgattcatagttcttggtagtgaaccaaaaaaatgagtatggcgaactaaaggtaatcttggactaaaaaaatacgtatggacatgcgattgtcaggtagaggtggatactcttctaggaaactgatgaagtagaaaggaaatagagaccggtaacttttgaaatgaaatatgattagaataattgtggcttatactccgtagcataaattcttccttttttggtgttgcagccatggaaaaggtgctctagcccagatgatgcagccatgaacaatatggattcgtattggaaccaggtacaccatgtgattctttacccccatctatgctttcttgatctatatgcattgagtaaaagttcttcatttttccttgatccttcattaatattaattatccatagttcgatagaacttgctgtggttactttattggggttctaaaaataattcctctgaaactaaatcattcagtcataccttcagtagagtaaataatggctctgaaactgggatctctcatcttggttacctttacctactgcactgcaaaacctgaagcttaagctcaagctaggctaggctcacaaaataatggtgatgattagttagctaaaatcaaaccctttgtccatttactctagctaacagcaagaataattaatagcaagcactatgcctgattgtgtcctgaatgcctaatcaagttccatctgaatataattttattgtgtttaacttgtgaaatcgatgcagatgtgggcattgcagttttgtatggcagccaagagatgcctggagttccattacagtacaggcaatctcaggtatgacgaactgtcacattgctgatatgactctgaatctccactgcacttgactgcaccctctatcttgatctgctagacgacttataatttccacattcccctgcataatttgtccttggtctgaaagaacaattcctgatgatatatttcaaatcaggttgttgccaggatcatatggccaatatgtacagtcatgctgccgttatccgttttccttccagtaagttttcactacattttgtttctgttccatttgagaatccctaaaccatgaagactgtagagcaaagatagatgatggacatcgtcacgaatcaccagggctgattactactacctgcagttgatgacttcaaattattcaaggagagcatggcgtacaaggatgtaaggtctgtgcttgcatccatgtaaatctgggggtcggtcaattctgttttgaattgaggggaactttgtttttcatcaaggacaagccaataataagatatttacaaaagtaaaatatgctcagcaaactcgctttgcttttgtgccactttagtccagtaagttggatcattcttacccaacgaaattagataatttataccttcagctcagaacctattgcggttcctttcctggggctctggaaacaattactctgtattttgatcatttagtcatcacttcagttcagtaaccgtacaattgctccgaaaactgggattttctagaaaagtttacacgcctaatatagtgggagggagggagtattattgttgatcattgattaggctggagctgctccgtattcatttttcacggatgctaatgactaatttggctattaaatggcagatctttcaggagaaattcggcgcctcaaatcttgaagattacttctgattaggtacatcgtccagtttttatctactacatgcatggtaattttagaaattgcaaattaaatcatatcatggatagatcacaaaaggatttcctttcggattggtgagcgattgagaactttagaagtcaaatgttgcggatgtttctaacaagaagatgcttggactaacttagtgtcacaacttattcagtattgggttctaccatcaattataataagaggttcattattcgcgaaatcttcttgaagccacatatttttattttggctgttattttcaatcaacctactacaataaatgtaagagtttactaaggtttgtctcaccagcacatgatagccaaagaattactaattgttagcatcttaatagtatgtgataagcaagctagcacaagattgtatggttttattttctgggtcaaaagcttaatttttgacggagtgatgcagctggtggagtattatttttctgtgttttctccatgtggatttaaccttacatctccagcggccaaccttttgatggagtgaacatctacaacattgttgtgccttgtcattttcttatctggctctttccattatttgttcattttacaggctgcataattgtgcctaactgactaggccagttctctggtacacgcaaccacgctccctcgccgccacctgctacttcaagtctgccaaaagccatgctggaaactgggcttctcgacagcgcaactcaatctccacctcaccctcctcatcgtcgccggtatacatgcatctcgttcagtctgtttgtggtacaacttgtagtctcctcaatccagaagtaggagtttacagaataattacttctctgaatcactcataatccagtttcgttttcttggggttaactcaaagatctattgtcaaaagtgtgaatatgagtgcaagtatgctctatttttttaactcctaaactatttcctatacatggatattattgctgaatatgatggaaatctggatgttcactttggtattcatcaggcacttaacatatgagttccagtaagcaggaagtttcctataatttccctggatgcaataggatgaactttcattttattggaaggtgctatagtataaatttcaaagatctcagtttctgttgttatggatttataaattttaaacatcagtcttgtggtgaatacaatagtctattgtattttggtgaataaaatgcgtcaggcagatccccactcttcaacagagcttatataacattcagattgtctattaggtcagtttatcactgcacttcgtttcattatttgtttcgatcaagtgtaaatgtaaggaagatattgttgtcccttagtaataatccatctatgaattaggaggtaggttctgcatgttgattgtgcttcaaggcacaattgcttgtggctnnnnnnnnnnnnnnnnnnnnnnnnnnnnnnnnnnnnnnnnnnnnnnnnnnnnnnnnnnnnnnnnnnnnnnnnnnnnnnnnnnnnnnnnnnnnnnnnnnnnnnnnnnnnnnaagtttgattcagaggtagcttaagaagtgaacattttttgttctttgtcattgtaggtttccttccaaagatgtgtattcaggcttgctatgtgacgcgttgggagaatatgatgcaagggctctcaacactccacttcacttcctgtcgttgccatcacgttgtcaccgtacttcggctggttctattgtgcatgcttctttctatttggaatgcattgttcttatttttttaggctagctctcgtttcaattaataacatgacaaggtatgcaatgcatgcaaatatatttaacaatgtcgacaggtcggttgtgactgtagacatgtcgtttctatcttgagaagctgcagttcaccgcctgtagacatgtcgtttgcgaatgccactgtatatactcaatgtagcgtgtgcttcttaagcctgtcggcgacgttaactctgtgaggaattgccactgtacatttgaatagtttgtgcgacatgtatgccatgatcacaattgcgtccccttccttttgagctacctagcatatgtgtaatgcatagtttaaccagctacacagctgattgttaattgtccaaatttaatctgctttcagctcttaaggatttggattactactttaatggatttggcctgatataaagtaattgattgacaaggttctcagttatacatgcatgtgtggcagcaagtagagaaaaagcagccgaaggggcgcttgtaaccctggcaccgcagaggcatcgttcaagcggcgcgccggtggcgcgccccacccactggtacgtaatatgctctgcaaacttccatcattggttcattgtgtcatcatgagatccttgctgtcttccaccctagcatcggctggaagaactgtcatcatctttaggttgcgaaaagagttggtgatgcatgctctcccatatccacaccactccaggggcggaaaatttttgtgtttaaaccctttttgcataccaattcaggatctgaccccggttggaaaaaaatcgggatttaaccctttcgctgccgccagaggttctagtggtagggttagacagcctaccgccagggtcctttgcggtagggtgcgatggagggggacggcggccatctgcacatgttgacgtggattagtaccctaccgctaggcactatggcggtaggctgtctgaacctaccgccagcacccctggcggtagggggtggcttgggtttttgcctccgaaaggttctgtaacaaaaaatcgcagcagcctcgcggtaggttgtttgaacctatcgccagggggtttggcggtagggtcctggaataggcagaatgctctctgtgacaaaaaatgcattgccctggcggtaggctgtctgaccctactaccagggtccttggcggttggtgttcgcctcttttcaaaaacaatatcacagatctcaaacaatatcacaacaatgatatagagtctaaaaaacagatctcaatcaattaaacttggggatcacatacacattaataaaagttgaactaaatagacatgtcaaacgaagttcaactacttagcaagcggagttccacatagtttcacaaatagcaaacacatagttccacgtagttttacaaccactagacaacccaactacaagaggcaagtatccaagagcagaattacttgctccttcccctcttggaggtacggtcctcgttcctccttgaacgagtctcttcagtcttcttcatgggccgttgagtaaccggtctctggaaagggtccggactcagcaaatccttcttcttcagattcctcttcggcagctgagatggttgaaatgattgagttggcagaggtccgtagnnnnnnnnnnnnnnnnnnnnnnnnnnnnnnnnnnnnnnnnnnnnnnnnnnnnnnnnnnnnnnnnnnnnnnnnnnnnnnnnnnnnnnnnnnnnnnnnnnnnnaaccaacctatacgacgagggaacatggctcgatgagccgatgtgaccctgtgtgactgcaggatgataagcttcaaccgacccagctccagcacacccaagcaggcctaccagcttgcgacaatgcttcacgaacttctgcactcacaatgaaacaagggcataataagtatcagatttatgattgtaagtaaataagatgcatctgtttcgaggaggctgaaattgtaccttcatcgtccccctcaatttgttctcagattgtacactcccgggggtatcacctagtgcaccggaggcttcaaagatgcatctgttcagctcatcggactgtaaaggcacaagtcagtcacaatgacgaataaaataatttaaacacaaccgtcggttcaaaattaccactctgttgatgaggggtgcaaactccctaaatccagtatgcatgtctctgatgccggtctggtatgcctcttcctcggggtcatccctctccagctccacgatgtcttccaccatccaccgaggcctgagacgaagacgattcttatggccatcatcgtaccagctcatgtgttggccctcgtaagcattctagttagtcactctcctctccccagctttacggaacatccgtcggttccactctgtcacatgagttttatgctcctctctccagtctgtaatcgactgattcttatgccggctcagcatgcaaggcattagcatcataataaagtcgaacgcaatgaattcatgggcacgaagaacaagcgcgctcacaagtggagcgcgtggctgccggtatcggtcggcgggcccggtggggtatgctaatgcaacccaaactgcgcggccacgcggtgtggcaagtgccactcgacggcgtacacacaaatcatgggcacgatgcacttccaaagaccatggtccgcatcacacatcacattcagatcaaagtcccactttcggtcatgatacggccaccagtttacctattacatatacattggtaagttcccactctcggtcaaaagtggaatccaagagaaaggtggtgagcgggttcatatacctatataatcgtcaaagcgtccatcttgttggtgtaggtcttgtacgaagccttgtttaggcccgtgtacagtttgaaaacgtcccactagtaagctacggtgggtgtcgagtagcatccccgtctttgctataggcaccccatgggcgtctttgcagcttctctggacgccccaccagcagccgctcccacatccaaatgtagagggcccagacaaagccacccatattgaacttgtctcccgtcctctgggttgcgtcgtcaagctgcaaaacatcaaatgagggtcagatataacagaatgtcatggacatacttccgtaggtaggcaatgagatactctcttaccgaacggtataggtaggcgagagatgcggtccaccaactgtaccctgcgtcccagtcggctaggaagaacagatacgaccagttggtagagttcccggagctgtctggaaacacaacctccgtgagaatataccataggtaggccctcgcgtaccactccacaatcgcctcatcggcgtcttcggggcatgtctttcggtgctctgagagccagggcaacggtacaccagatgtacggttacccttagcaccggggcagtcgccgatgagggtggtaaccctctgctgccagttggtcctctccaatcgcccggtgagtgcttgaccatcgattggcatggcagtaatcatcgcccaatcctcgagggtcaccgtcgtctccccgcatgggagatggaaataatgggtctccggccaccaccggtcaatcaaagctgtcagggatgcgtggacaagcgtcggcggctgacgcttgaactgcaacacgaaacccaacagtcgggctctcttgaagtacgacgcgtagcgctcgtcgtagtccttattcatggcaaccccgtgatccctcatacgtagtggctggagcatctgttgaaaagtggacgacaagagttaggaacttattttcatgaatccgaaaactttgatcaatatttccttcatattacttagcactccgttctctatgaaacgggcacgatgacccttgtcgaatgcgtagtcaagcatggagtaccgtgggccgatgttctctgcaagaggtgccagccttaataaaatttcataaactaaagcatcataagcataagcatacataaacaaaaaatgaaatttcttggttaaatgaactagggttcatcttaagcatatttctccaacaacatctactacacatgatggnnnnnnnnnnnnnnnnnnnnnnnnnnnnnnnnnnnnnnnnnnnnnnnnnnnnnnnnnnnatttttttaacaattttattttttgaaataaagttcatcttgaatgtattttctccaaataannnnnnnnnnnnnnnnnnnnnnnnnnnnnnnnaaaacaaaacaagtcctcccacatgcattacatcatactttctttaacaaaaaaaattatgaactagggttcatcttcacactaacatatgaactattgattagagttcatattcaataccactagttactaaagaactaagaagtagaactacaatcaagctaaaccaatcgtaggtgaaaaaaagttccaatctaagttcaaaaagatgagggatttcaagaaaataatgctcgaatcagaagcaagtatgcaaaaactacttggagggattggaggagcttacgtttctctcttcggggccatctcgatctgcaaaaaagatgaagaaacagtgaagatccgagggggggagtggaggagatgagagagggagagaggggcgaggggggaaaacaagaactgctnnnnnnnnnnnnnnnnnnnnnnnnnnnnnnnnnnnnnnnnnnnnnnnnnnnaataactgctcgcaccctaacgccagggactgtggcggtagggtgcgacagagggggacggtggccgtctctgctagctgacgtggataagtaccttaccgccagggaccctagcagtaggctgtctaaccctaccaccagcacccctagcagtaagaaaaagggtcaaatcccccctaaaaaaatatccaactggggtcagatcctgaattggtatgcgaaaagggtcaaaacacgaaattttgcctccaggggccacccatgggccgacaaaataggtaaccacccagtacaaactagaagaacaatcttcgccttggggttgaccaccctggaatggtgatatctaggactggcccataggacgaccaccctgggctctgagaggaggtgggcctcaattatagtactaaataannnnnnnnnnnnnnnnnnnnnnnnnnnnnnnnnnnnnnnnnnnnnnnnnnnnnnnnnnnnnnnnnnnnnnnnnnnnnnnnnnnnnnnnnnnnnnnnnnnnnnnnnnnnnnnnnnnnnnnnnnnnnnnnnnnnnnnnnnnnnnnnnnnnnnnnnnnnnnnnnnnnnnnnnnnnnnnnnnnnnnnnnnnnnnnnnnnnnnnnnnnnnnnnnnnnnnnnnnnnnnnnnnnnnnnnnnnnnnnnnnnnnnnnnnnnnnnnnnnnnnnnnnnnnnnnnnnnnnnnnnnnnnnnnnnnnnnnnnnnnnnnnnnnnnnnnnnnnnnnnnnnnnnnnnnnnnnnnnnnnnnnnnnnnnnnnnnnnnnnnnnnnnnnnnnnnnnnnnnnnnnnnnnnnnnnnnnnnnnnnnnnnnnnnnnnnnnnnnnnnnnnnnnnnnnnnnnnnnnnnnnnnnnnnnnnnnnnnnnnnnnnnnnnnnnnnnnnnnnnnnnnnnnnnnnnnnnnnnnnnnnnnnnnnnnnnnnnnnnnnnnnnnnnnnnnnnnnnnnnnnnnnnnnnnnnnnnnnnnnnnnnnnnnnnnnnnnnnnnnnnnnnnnnnnnnnnnnnnnnnnnnnnnnnnnnnnnnnnnnnnnnnnnnnnnnnnnnnnnnnnnnnnnnnnnnnnnnnnnnnnnnnnnnnnnnnnnnnnnnnnnnnnnnnnnnnnnnnnnnnnnnnnnnnnnnnnnnnnnnnnnnnnnnnnnnnnnnnnnnnnnnnnnnnnnnnnnnnnnnnnnnnnnnnnnnnnnnnnnnnnnnnnnnnnnnnnnnnnnnnnnnnnnnnnnnnnnnnnnnnnnnnnnnnnnnnnnnnnnnnnnnnnnnnnnnnnnnnnnnnnnnnnnnnnnnnnnnnnnnnnnnnnnnnnnnnnnnnnnnnnnnnnnnnnnnnnnnnnnnnnnnnnnnnnnnnnnnnnnnnnnnnnnnnnnnnnnnnnnnnnnnnnnnnnnnnnnnnnnnnnnnnnnnnnnnnnnnnnnnnnnnnnnnnnnnnnnnnnnnnnnnnnnnnnnnnnnnnnnnnnnnnnnnnnnnnnnnnnnnnnnnnnnnnnnnnnnnnnnnnnnnnnnnnnnnnnnnnnnnnnnnnnnnnnnnnnnnnnnnnnnnnnnnnnnnnnnnnnnnnnnnnnnnnnnnnnnnnnnnnnnnnnnnnnnnnnnnnnnnnnnnnnnnnnnnnnnnnnnnnnnnnnnnnnnnnnnnnnnnnnnnnnnnnnnnnnnnnnnnnnnnnnnnnnnnnnnnnnnnnnnnnnnnnnnnnnnnnnnnnnnnnnnnnnnnnnnnnnnnnnnnnnnnnnnnnnnnnnnnnnnnnnnnnnnnnnnnnnnnnnnnnnnnnnnnnnnnnnnnnnnnnnnnnnnnnnnnnnnnnnnnnnnnnnnnnnnnnnnnnnnnnnnnnnnnnnnnnnnnnnnnnnnnnnnnnnnnnnnnnnnnnnnnnnnnnnnnnnnnnnnnnnnnnnnnnnnnnnnnnnnnnnnnnnnnnnnnnnnnnnnnnnnnnnnnnnnnnnnnnnnnnnnnnnnnnnnnnnnnnnnnnnnnnnnnnnnnnnnnnnnnnnnnnnnnnnnnnnnnnnnnnnnnnnnnnnnnnnnnnnnnnnnnnnnnnnnnnnnnnnnnnnnnnnnnnnnnnnnnnnnnnnnnnnnnnnnnnnnnnnnnnnnnnnnnnnnnnnnnnnnnnnnnnnnnnnnnnnnnnnnnnnnnnnnnnnnnnnnnnnnnnnnnnnnnnnnnnnnnnnnnnnnnnnnnnnnnnnnnnnnnnnnnnnnnnnnnnnnnnnnnnnnnnnnnnnnnnnnnnnnnnnnnnnnnnnnnnnnnnnnnnnnnnnnnnnnnnnnnnnnnnnnnnnnnnnnnnnnnnnnnnnnnnnnnnnnnnnnnnnnnnnnnnnnnnnnnnnnnnnnnnnnnnnnnnnnnnnnnnnnnnnnnnnnnnnnnnnnnnnnnnnnnnnnnnnnnnnnnnnnnnnnnnnnnnnnnnnnnnnnnnnnnnnnnnnnnnnnnnnnnnnnnnnnnnnnnnnnnnnnnnnnnnnnnnnnnnnnnnnnnnnnnnnnnnnnnnnnnnnnnnnnnnnnnnnnnnnnnnnnnnnnnnnnnnnnnnnnnnnnnnnnnnnnnnnnnnnnnnnnnnnnnnnnnnnnnnnnnnnnnnnnnnnnnnnnnnnnnnnnnnnnnnnnnnnnnnnnnnnnnnnnnnnnnnnnnnnnnnnnnnnnnnnnnnnnnnnnnnnnnnnnnnnnnnnnnnnnnnnnnnnnnnnnnnnnnnnnnnnnnnnnnnnnnnnnnnnnnnnnnnnnnnnnnnnnnnnnnnnnnnnnnnnnnnnnnnnnnnnnnnnnnnnnnnnnnnnnnnnnnnnnnnnnnnnnnnnnnnnnnnnnnnnnnnnnnnnnnnnnnnnnnnnnnnnnnnnnnnnnnnnnnnnnnnnnnnnnnnnnnnnnnnnnnnnnnnnnnnnnnnnnnnnnnnnnnnnnnnnnnnnnnnnnnnnnnnnnnnnnnnnnnnnnnnnnnnnnnnnnnnnnnnnnnnnnnnnnnnnnnnnnnnnnnnnnnnnnnnnnnnnnnnn

SEQ ID NO: 13 - DNA, 13004 bp, Artificial Sequence
  Scaffold 1916860
cgtactgagtggggaggaagggagggaggaataagtttttttgccaaaaagtaaaaaaaaattactggcgcactctgtctctagtacgccattagtagttctaactactaatggcgcactttgcccggatgcgccattagaatgtttgaaaaaatgaaaaaaaaaattgttttactagtggcgcaccttctgcctggtgcgccattagtgtattccacactaatggcgtatctctaccaggtgcgccattagtatatagtagtggcgcaccacttctctggtgcgccattagtgtcaatcctatctttagtccttttcctagtagtggtggtggcgatggagctcgtggttctccggcagggcttcgccaagcactacagaggaggaggaggtgttgaaggagggagggggctgcgccagggaagaggtgcggctgccctcccacccctccaaagaaaattttgtgctgcagatcgcatgctaaaactaggatggcctcacgatgacaaatgcagcttctgcaaataagtgctagctgctacaaaaaacattgagaggttgcttatgcaaaaaaaaaaggctgatgaaatgaagaaggtactgcctgctacattacttaatatatagatagtgttggaattaaccacgacgtaagagacctgtccggtagggattagtggtaggctagctaggtgctatataatcctttgtatccccttgtaaacaaaccgtgagatcagagaaaaaaatgggtgtgacatgagccttttgcaatcaatcggcatctcgtgtattgcgtacgtgtgtatgagtgctttgtgcatttccagcaagccatagtagctaggctgctgtcgtatgttcctctcaccagaagtacacgtcagaatgcagcgccgatgttgggcctatgccaacagatagtactatgtacagaattagctttttatatgaaacacagcagacattgtttttgattcattaagggtaaactccatagggaaaatacagggtatgggcattccaaaaagaaatgtacacccagggtaatagctgtacaaacagggtttggggagggccaaattgcactattattgtgccaaccatttaacaccttcaggttatatatatgttccaatgaaatcattgactttggcgttgaagattatgttgttcttttctttccaaacctgacaccagatcagcataaagtgcggagaaatctttgcaacgttgcgaggggatgttgtccagggtgtgtagccaccattgtagcagcgagatcgtgtcttgttgaagcttggtctaagatcaatccgataggttaatgagtatggttttttgtaggccgagctccatggtaccttctatccacaccgttggctgaacatcatgattttagagatttgagcaaaagctgaccagttttgctggtttgttgcggtgtgcattacaacaaagagagagtctggcgcatgcaagatttaaatatagagaaagagctacgttgtgcatgcagagttgatagagagaccgagaagttgacagggccagaaaaacgaagacactgtcacacagcatcttcgtcactgttcacacgcctccctctcttccttttctctctcttactgtcacccaacacctctctcttcctattctctcacgaacagcacctgcatgcacctctctccctttaaatctcacatctgacagcatctctctctaggaaaacaaaagcactctctctagatgggtcaaagaatgatgtgcgggaggtgggacggaggagaaagtgtgtacagtgattttggttgatgcatgtcaaatgaaagtgacacatttgtcatctggcaagcaccgctgctgactcctactatttgctagcgattagaaaaagaaggaagagaacagtgctcctgcagcttgcccacacacgcacccttttgattcacgggccgacagcttgctcagacgcccctgctaattactctgggcatgtcagaacgacagcccgtggagctcggcctatgctgcaactttccgtaggttaatttggtcagaaattagccccagacattagcagtaaatgggcaagttgcaaacaggtggacaacagacttgaagtcaatgttacacagttggcaaacaggattggcaggccaattccttcttgggagattatctgctgttagtcattttccttgtatggttagccatgcaaagaacttcactttttgtgggatcttaatcttccaaatgatgtgagaaagaggcgtctaaacccttctaatgaactggcaatagtaagatgaacttgcagggtaactatgtttcattcgacgtaacttgccgggtaactatgaactgtaagggcttggatcgaagaagggtgagccgagttgcatttgcttgctagcagctggatgtactgtagcagaaaacctatgttagagaagcaagtgcaagtgctaccccctccatcgcaaaatataacatcatttttcgagcaaacatagcttcagaaacgatcttacattgtgagacagagggaatagttctgattagagtcggtgaaaaaaattactaggtagtggattaggttgttagatgtgactggatcaggtgctcctattacccggcctttatgccggtgttgcatcttattgacgttccacgacatgtgctcatcagagaaactacatggcagcgcaattactgagaagttaattctcgagcatcttacatgtgtactacagaaacatttataaatgaactgagagctactgaagcagtaattcctagtggtctgacatggccgcatttcagaaacttggttgtgctaatatatagctaaaatgtatctgcagttttctgaatagtttggtgagtgactttaaatgtgggtgcatcaggtaagcaatagcagaaatcaattgagctgttgtttttctagctgtcaaaccaatcaacgaacataactttggattgtagaaacagagaagaaaccggtcagataagattatcatcagaggaaacaacacaaccttataatttgtaaattgtaacaaccagggaaatattcatcagtgcagtcttttgtaggccgagctccacagcaccctgtgtccagactgttccatcgaggctcccacgcatagggatatggggtactaaggggctcggccttggatacaactttgcattagcccaatatagaggggaaactaagcatgaaaccgtacagcaaggcatgaaaactctaaccacaactttgctatcgaaaacaggataaaactagcaaaaccgtagagctacgattaatggggctacaattttcatacaaaggggaaaataaaacttgtaaaatttaattattttgtcatacacgtgtgcttctactgttgattatgaagttgagaatggaaccagaactgcaaagaattaatcacaaagtgctactgaatgttggaacccaagccgtcaaactcatctcataagggatattctgggtcgtgtatgggaccctattatctgagaaccacctcacgatctccatggactgcaggtccagccaaaaggaaccactacatgcattgatgagcacagtgccactcctctcagcgaaccacactaggctgaatctggctggcttcgtcggcggaatgtagctcccgcctgccttgtcaaggaaccgcaaaattgtctccgtcatgttgatcaccacatgtggtcgttgcttccacttggctgtatgttgcgattgtgcccaagctgatatcttatcatcatgggcgacaagcacgaacacatccccacccactgacgatgttgccagaagtttttgatgctcttcgttgtgtgggaaccctttcgggagcttcgtcacaatcacctttgccgctttgacgcggagccttaggacataggatccagtgtcagtctggcacagccagtgcacagcgccgccggtgaccagggccttgccgaggcttcgttgaaacctgctttgtaggttaggaagccaggtctcggtgtagaggcaccacgcaccatgctctgtcgagaaggtctggaactgaaggttagcgccatattgtgatatatctagacatgccttgaccacttgaaaatgccggccaacggaggtggccgccttatcacagtcaccaaccagcaagacataacttcaggctcctgccggtggccgggttgcacacacagagctctttggccacgcccacacgggcgagcactgttaaacatgttgtatattgcgtgtgttctatattgttaggatagcttaggtgttgagataagatactagtagttagtttaagagatcaatctccacctaacctaaaccgtaacctcctgtatcttgtgcgcccccaagtcttctggtggctatataacacgcaatgcgcccctgccaaggcatgcgcttcatcacctatttccacatagtatacagagcctagttcttccgtacgtctaggttatgtcgtcctcctcctcctctcacgccatggctatgccctccctcgctgccctcggccacaccatcacggagaagctcacccgcgataacttcctagtgtggaaggcccagttactcccgcatgtcagggccgccgcgatgatgggctacctcgacggctcgatcaaggagcccgctgatgtcatcatctccgagaaggaaaccgcttggaagaagcagatcaccgagacgcctaacccagaacatgcgatctgggtcactcaagaacaacaggtgctcacttttttgctcgcctccttgtcccgagaggttctgatgcaggtctcgaaccacaccactgctctggtggagagcttctctgcgcagtcgcgggcgcgccagatccaacttcgctcggtgatcgggaatgcacgcaagggtgatctctctaccgccgcctacttcaccaagatgaaggggcttgcagacgagctcgccgccgccgggaaactgctcgatgaagacgacgtcgtctcgcacatcttggagggcatcatgcacgagcccgattgcaacaggtttgtcaccgccatctctacgcgcgctgtcaccaatcaaccgatcggcctcagcgaactcttttcgctgccgctctccgcggagtcaccgatcaccggccagcacgcagcctacaccgcccatcactccgccaacctcgccgcaaagggtggtcgattcggctacggcggcggacgtggcggccaggctggtggccgtggtggctacaacggcggcaactacaacaactcaggcggcggtgcgccgcgccaacagggtgaccgcggtgaccgtgagcgctgccagatttgcaaggaggaaggccacggtgcgtggcgctgcaggaaatggttcgacaagagctacaacaacaacgtgcgcaacccagcaggcgtcggtggtggcggcggacgcggcagtggtgggcatggtggcggcggcggcggtggcaactctcgctccgccaactctgcccactcctatggcgtagataccaactggtatctcgacaccggcgccacttaccatgtcacgggggaattagagaagctggccgttcgagaccgctataccggcaccgaccagatccacacagcaagtgggcaaggtatggacatagcacatattggccattcagtattatctactctggttccctccacttaaacaacatcctccatgctcctagtgtcgaccagagccttctttcagcttataatcttatgcgagataatgatgttttcattgaacttcaccctgaattctttcttgtcaaggatcaggctacccggagaacaatccttcaaaacaagagtagatggggcttgttccccgtgatcggacggcaaagtgcccctcaacgccaagttcttgctgccatcaaaccctccacgtctcggtggcacaagcgcctagggcacccagctcttccggtagttcaaaagattcttcgcgacttcaatcttcctgttttgaataaaaaagatcacctactagtgattgatgcgtgtaaaatggccaagagccatcagttgccttattctcgttcaactagtgagtcctcagctcctttagagcttattttttcagatgtttggggtcctggacccgtctctgtaggaagacagaaatactatgtcagttttattaatgattttagcaagtttagttggatatatttgctcaaaaagaaatctgacgtctttgaaaaatttcgtctcttccaagctcacgttgaacgtctctttgatcgcaagatcattgccatgcaaaccgattggggtggggagtaccaacggttgaattctttttttgaacgcattggcatcacgtatcacgtttcttgtccacatgctcatcaacagaacggctccgcagagcggaaacacagacacatcgtagaagttggcctctctttacttgctcatgcttttatgccactcaagttttgggacgaagcgttccttactgccgtttatcttctaaatcgcatccctagaagagttatcaagaaccaaacccctctagaacgactcttcggcactaagcccatgtcgcgaccggcttttccgggtaataaattccagaaaaatggccgtcgtgctcatcagccccaggattactgttagctgatgtggcatcaacttggtacagaaaaatccaagcaaaaaaaatacaggatatgtagtacaagaccattctggcctgcgagtacaacaaatggtttctagtggttgatggcggaagcggtttgtggatcatcagtggaactccatttcccacggaaacagctgaccaggttaactcctatcttcgcgaggctgctatcacttgttacataggttccggggcagtcgtcggaagctccgctccacgcaagaaatctggccaagacaatagccagggacaagccagtgagtactttgaatgtactcgcaaacattatgagcacatgtataatataacaatcaaaaatcatgccttgaagaatattttaagatcacaacgtcagtcataaaaatgaaatccttggggcatgcttgtagattattaataagtaaccacaaatatgtaatgacggggcagcaataaatgccacagtcgggcgtctgagcgacaccacataaagggcttataaataaacagaagcaatgccacagtcgggcgtctgggcgacaccacataaagggcttataaataaacaaaaaaacaatgccgcagtcgggcgtctgagcgacaccacataaagggcttataaataaacaaaaacaatgccacagtcgggcgtctgagcgacaccacataaaggacttataaataaaccgaagcaatgccacagttgggcgtctgagcgacaccacataaagggcttataaagtgaatacagtgaatatccaggaggtagaaccatcccagggatactcaataattcaaataatataaaggggttagtccataataataatcatcatcatcacaagtcacgaatcataaaccaagttctggtttagtagttctcctctggagactgacactaagaccgacacttgacccatcccagactgtagtcctgaactagggacactgctattcgaataggtttaacatctgcagagggtgtacttttacccacgagtaacggattcctttagtccatcgggactaattccgtctacagtcttttaattgaaaacacacctgacttgcacacaccagcttaacttacccgtgtctggaatcacccatgacacctgtcaagcaaaactctaagtggggaggctacaacctcgcgtagcatgggatcaaatttataacgcgcgctctaaggggtggcctcccctctcggtctcaaacggaaacacccatgcccccggaccaggtggcatgcctaccggcttcaaccgatattttccatcatggcctctctgtacggtgtgtgcttgaaaggggttgacgactgactgaaccgcaccctacttgttgtagggacaagtgatagtacgaagcaagtaagggcttactggaacaagactcgatataggtcgactcaggaggtttataaattcctcacatgacatatatgacaaaatatatttcaaccaacaaagtcaccactcactataccttaccatgccataccgggcataaccatcccgtcggggaccggcgacaagctcacgcctacccaaggcagaggctttcccggattcctttccggcatgcatgacaggcacatgagaatggtcaccatcacaagtataatcatttccaacaacaagtagatcacaaaaaatgcatccatgcaaataatcatatcacatgaaataacgaatattccgaaatgaggtggtgctataagcgcgccaacgaacacatcaaaatatcatgccgggttcagaatgcttgccttcaagttgtggaggggtgaggtgctctccagaacttttgaaagttttctcccctctcttcaaaaccctaattgaaatatatttgaattaacacacattttcaaaacagcacaaaaaaaattagtctgaaatatttgaaataaatcttaaaataaactagacaatatttttgagtggtaggaaaaagaatcaactcattcggagttttatttaaaaagttatagccagtcaaagtttagtcaaatctgttatttaaaaagaaacagaaaagaaaacgtttcaataaaacacgtacacgtcgaaagcgtattttaggtttacgcttccacttactccagcgtggacggtacggaagtcactgacagtgggcctgcctggcccactggtcaggtttgactggtccacctcccctcttcttcctctgtcccgagcggaggcgggactccggcgaccgtcgccggcaaatggcgggtccttgtggggagctgagggcggggatggatccgcggatctggcgcaatccttctggtggttgcagggttgtcggaggtggagggattcgccgtcgacgagcttcgcggcggccggtggtttcgggagcgaagtgagtttgtggttatggtggctctccgtcgcagctgggggtctgggtggcaccgcaagaaggagtggagtcatctggtggcgttgggagggccggggaggctctggttgtgccgaacggagctagtaggtggcggtggccgaactggccggagttggcgaagatcaagaagaatattatataatcaattcttctgataacagaaaagattttcttgagagggtaaacaagtccaatattataagtaaaagattttccatctgagggaacaactccaagataaccaagaaaagaatggttttgaaatcatgaaaaatcaagaaaaaggaaagttaaatttcctggcaagattttaattagcaaaacaaagttaaaatttttggggtgtcacaacactaccccctttaaaaaaaatctcgtcctcgagatttgctaagagttatctctatagcaaaattgcatcaaaacaaaggcggctatagtgagagggcataagtggtgcaaaatacagtgtggaacactggcgctgcgtggaaaaatctacggtttggagcaaaacaagagatttctacgccggatatagatttagaataaattctaaatctcaaaatacgctggtcgcacccgagagcacagtgttctctctggctgacaggtggacccgggcccactgtcagcctcttcttcttcctccggctctttcttcttcctctctcccgcgcgctttcccgcgctttctccaccggcgacgcctagcgtgtagggcatctaggccgtactgcggtagtgcgcggcgtgctagctgccggtgcagcatgcactcacttcgcgggccagtgcgctgtcggcactgcttgaggattcgcctccgaacaccggcgatcgggcgacgagcggcgctggtggaccttgcccaccgtacaccgagctcgagctataaaacggccgaggtgttctcctccttttcctcgcacctggcctcgctcctcctcctccctccttctcctctgtttccgttggccggagctcgagatgaggctctaatggcggaggtggtgccggactggtacgtgatcctgttgtgcggagggctggcagcggtgctggggctctccgtgctcctgtgcacgatgatcctcgatgatcgtcgcgacgctgctgcccgggtgttggctctctgtggtggtggtgatcacaaggagtaggtgggggtgtgtcgggcactgactgttgccgggaggtgctcagttagatgtaacaccgttgcaaaattttgcaagcggtgtatgtgtccgtgtaattgtggttgtgagtctgcatgccgtggtgctgtgggaaataagataatccatgtcgtgaatgatgcagcaatacaggaaaagaaatctcactccaggatttctcgcgagagaacacagtaatacattagagtcaaactgcaacaataactaaaactaaacgatttactctccgcgaataaatgtcacagcaataaatacagcggcgacgtctaaagtgaaaacggtaactggacggggtcctgagaaaacgtctctggtacttgaatacactcttcttctatcggggaaagtggattgaccacacgatgaatgtgcctctcctggtctggcctcaatgatctgccgatggcgatctgaggatttaaatccgcgaggctctgtagataacccatcacgcgttggtttaaacgctcttgagcggtcacgtattggacgaggttggccgagacggggtctctctcaattcgtccatcgggaaaagatgttgctcctccgggtgctgcacggctcggaaaataataatacccttgttcgctggcatagggtaccacgaatcgaaggcgagcgagcgcttcgtacgccgcagcttctacggccatatgcggggttggcatggatttccctacgaaggagacctccgttggatcttggtttgggtttacgggagggatgtgcacggctgcccaatatctcgaggtggaaggggagattctcgatttaaacagctcgtactggggtggctgggtagcgcccatggtactgcaggtaaaatcccacaatatcttgacaaaactacccggggttgcatcgggagttctcagatagatactggggctcggcatggcaagaaatggttgtgagaatggtgcacaaggtgaggggtgcttggcagggtcacgtagtggcccttttatagcaccggagatgggtcattttaccgtggtgaaagaaaaaaaatttgccggctcagcttggggtcaagccacagatacacgcatctcactaaagtgacgtatcactgtgggggttgtcggggcggtttttggtagctgcgccaaggatagggaaatcacactgcatgcgagtatatccatgcaagactactacataaaacagaggtacgatgacatgctgcgttacaaagcgaggatacactgagacttgacactactcgagtgacttagtctacttcgtttacatccaagcgggcgttccttgtggatgtcgaggcttctccacggttctcaccgtcggaattagctggagagggttgaggggctgcaggctcggggtagtgatgatgaccatcgcggggattgttgaccacaaccccgttggagtgtgctcccaggaggcgacgaagcacttctggggtcatcaaagcaccttggctgacggctggggctgacctcagggtctcgatcgggtgtccgaacagcacgactgggttgtcggcgttgggctcgatctcttctctcgccggggctcgacgagccagctctccacgagctgcgaccagatcaatggtgatttgatcgaatagttcctctagtgcacctacatagcacactaggtgcaacaatgcaggatctgtctcgtgatctccgttggcaacttggggtggtctaacgtacccttcacatctggggtagtagtggaacgagctacagttaactctgggcgacaagtgcctgagatgaactatagccctcgagcagctagttggatggcttgtggctcaaaggaagttgttcttccggtgaacctgtaggggcgctcgggcgctagacccctaccgtagatgtgtaccgtggcccagaattgacggctctcaccactcatgggtccttggtacacaacatattcgggtggctcttctaacgcataggcacgacgggtgagatttgcgagtatggtcacaaagcctccaaggttggttgttgtggtctcgttgtgcacgacgggtccgggcattgtggcttggtttggggaagatgttgtgctgtgctgggttggggctagtgtcacgcccaatatgcgaccctatccaaaaggaactcgacggtcccaccaaggatagacccgcatattgaaatgcttttgcaaggtggatatcattacatcaacattacataatacatagggatacatacataaggcacaaatgccacaagaatacatcaacatcatatacaagatcaacatccgactacggatgaaacataaacagaaactcaaacgacatccaccctgctagcccaggctgccgacctggaacctatcccctgatcgaagaagcagaagaagaactccaagacaagcaaacatcgctttcgcgtcatgatcatcgcacaacctgtacctacaactggtggtgtagtaatctgtgagccacgaggactcagcaatcccattaccatgggtatcaagactagcaaagcttaatgggaaaggaaagggtaaagtggtgaggttgcagcagcggctaagcatatatggtggctaacatacgcaaatgagagcgagaagagaaacaaaggaacggtcgtcaactagtaatgatcaagaagtgatcctgaactcctacttacgtcagacataacccagaaaccgtgttctcctcttgatcaaccccaaaaagagacactcacggttac

SEQ ID NO: 14 - DNA, 32429 bp, Artificial Sequence
  Scaffold 1891763
  misc_feature (8)..(324): n is a, c, g, or t
  misc_feature (2903)..(2968): n is a, c, g, or t
  misc_feature (3596)..(3694): n is a, c, g, or t
  misc_feature (5694)..(5827): n is a, c, g, or t
  misc_feature (6623)..(6651): n is a, c, g, or t
  misc_feature (6730)..(6765): n is a, c, g, or t
  misc_feature (6993)..(7048): n is a, c, g, or t
  misc_feature (7055)..(7111): n is a, c, g, or t
  misc_feature (7817)..(7852): n is a, c, g, or t
  misc_feature (7935)..(7995): n is a, c, g, or t
  misc_feature (8298)..(8333): n is a, c, g, or t
  misc_feature (13024)..(13064): n is a, c, g, or t
  misc_feature (19479)..(19510): n is a, c, g, or t
  misc_feature (20190)..(20284): n is a, c, g, or t
  misc_feature (20695)..(20796): n is a, c, g, or t
  misc_feature (21786)..(21881): n is a, c, g, or t
  misc_feature (22197)..(22298): n is a, c, g, or t
  misc_feature (22913)..(22940): n is a, c, g, or t
  misc_feature (26168)..(26218): n is a, c, g, or t
  misc_feature (26867)..(26922): n is a, c, g, or t
  misc_feature (27450)..(27571): n is a, c, g, or t
  misc_feature (27634)..(27652): n is a, c, g, or t
  misc_feature (27796)..(27986): n is a, c, g, or t
  misc_feature (28095)..(28154): n is a, c, g, or t
  misc_feature (29349)..(29432): n is a, c, g, or t
  misc_feature (30334)..(30450): n is a, c, g, or t
  misc_feature (30523)..(31134): n is a, c, g, or t
  misc_feature (31409)..(32429): n is a, c, g, or t
ttgtgtannnnnnnnnnnnnnnnnnnnnnnnnnnnnnnnnnnnnnnnnnnnnnnnnnnnnnnnnnnnnnnnnnnnnnnnnnnnnnnnnnnnnnnnnnnnnnnnnnnnnnnnnnnnnnnnnnnnnnnnnnnnnnnnnnnnnnnnnnnnnnnnnnnnnnnnnnnnnnnnnnnnnnnnnnnnnnnnnnnnnnnnnnnnnnnnnnnnnnnnnnnnnnnnnnnnnnnnnnnnnnnnnnnnnnnnnnnnnnnnnnnnnnnnnnnnnnnnnnnnnnnnnnnnnnnnnnnnnnnnnnnnnnnnnnnnnnnnnnnnnnnnnnnnnnnnnnnnngcacctcaaggcaggagtacctcctccaaatatgcaggcagcaaatcatgaagcaccatcaccacctgagcaagatgtgcaagatgaagatcctgtcattactcaggtatatttttgcactgaataatgcagaagatgtttcagtttggatcacttaattattgcttcattttttagcaggaacacaaccctgcagaaaatcctatcatagaagatcttatggttgatcaaatgatagaaagagtaagtacatgatctcatatattattgtgtagtacatgatcttatatattattgtgtagtacatgatctcatacatgatctcatggtaagttttgtcatacatgcagaggcctgtgccaagagtgattgcacaaggacctgtaccagagtctacattccttactgctgctcagctcttggtcaatcaaaaccaagggaacacaagcaccattcagcaaggagagatggccaagaagttacttgcatttaaaaagcagagagacaaagacttagaagacaagaaaaatgctatacttgcagcaaggagagcagaacaagaaaagaaggctgaagaagctgccaggaagagacatctgcaagaggagaagaaaacagcagaagcagagaggaagagacaggcagctgctcagaacagagagaagaagaaagaagaagcagcaataaagaagcaagctcaagcagagacaaggcagattcttctagaggttaagaaaactatagctgctgagaacaaagcaaagaaggaggctgagaggaaggctcaaaaagaagaagaagctgccaagaagctagcagagaaagaggctgctgcagcaaaaagaagagcagataaaaaagcagagaaagaggctgctgcagcacaaagaaaagaagaacttaggctcatatctattgcaatgggtaatagacagggtgattcagaacaccaagaagatggtcagccaatgaaggccagcagaacatccatgtttgatatcttcaggtgatgacagtggacagccagaacatcattgtactatacaagcttcttatttgtaaccagtttggtaatgtaggaatgttgcaattgatccataatgatgtagccacatgagtatggatcaattgttgctcattttgtaaccagttctactatgcaagctacttatgacttatgcttaatgccctggttttaacattgcccaacatatggtcacatttgtcctcttcaacttggagcatatggtcacatttggtcacatgttgtcacatttgtcctctccatagttattttgcaagtgaacacaataagccaaatacgacagtggtcaaatgtgcctaatttgacagcacacacacaagcatcagcaactatctttgcaatgcacacacacaagccaaatatgacagacctcaaatgtgcccaaattgacaggatcaccataagacatcaaagatgatccattaatttccatttgcagtacaagattctcacttgcattacatattgcaaaagcatcacatacaatgcaaaagattgtcacttgacactaacaacattaccacatattaccagttcatctcctaacatactaggcatcattccaacactagtcatactgcatgaactacatattgcatctactccatcacttcttcagcagagaaacaactataagcactgcaactacaatgagtgctgccaacagtgccttcatcatcaccaatatttcattgcctaaccctaccagtgcctctgcttgctgattgctcatttgccctggaactcttccattatttccaacttcaaagccttgaagatcaactgcacctccacctgcatatcttcgattccttgcttgcaccagctcttccctcctatcttctgcagctcctaatgcatctacggcttcattgcccacgagaaactgattatctagcaaataggcaatgtattccaactcccaatgccagaaatggtcctgaagatcaaaagaaaagaacaaacgccaaaaatcaccattacaagatcccaaaattcgaccaaaatgaagaacatggatgcactcaacttacaccaacaggacatctgtagaagacccagccctcgtgcttctccgtgttggagagatagaacttaacacgagtgcggcaaaaagggcatctgatgagcggcaccaccaccgaacggccgcccagcgaagacctgaccgagcttgtcgacatggcggagtgggagggagaggagagggaggcgccaacccgcagggagagggcggcggcaagcggcagggggacgccgccggcaagcagcacggaagagggcggcggcaagtagcggggagagtgcggcggcgacggcgacagagtggggaattagggattccgccacagcgtggggtatttcagggtggtcaatggaaaattgcatgcgcagggctaatttgcagaaataaccctcaccgtgccgacgtggacaacactgactggtcaaaccgagcggcgacgggtggcatacgcgcaacagtgaccgtacaaacacgtcttgtcgtattgggtgaccgtattgaccgtannnnnnnnnnnnnnnnnnnnnnnnnnnnnnnnnnnnnnnnnnnnnnnnnnnnnnnnnnnnnnnnnnttagttgaccatgtttggctttgaaaaaacggggagcttgttagtttactggttgagattattttttaatattaaatacagtggaaaaaaaccgtagaacaatctggcctaaaaaaggtttctagtggactaaccaattctagtagccagagaatcattcggacaattggttagtgtgtgtgaatggcctgagatgacaatgtagcccgggtagatcgagcaaaacatgccatcacttttccaccgtgctttccttgctgatgtgcgagacatcaacattcgagcatattatctgttcggtgcagcgcacgatcgcaccattttggcagccgaaagccacacagatgagagaaaaaaggtccatgcacgcattttcaaaaaacaaaacgtacgtttcgcaaggaattatacgaatgcaaagccaagcctagagagcttttccaggtagcatcagatgccctctcgcatgtggtggagatgtcagcctcactgggtactgcgtgcgttcgttctatcccttttttcacttttgagaaacgcgccccttttatgtgttagagtttacatgtgaagcaaagctgggttatcacgacgtacgtacggaaccaatcacatgactctagcagcnnnnnnnnnnnnnnnnnnnnnnnnnnnnnnnnnnnnnnnnnnnnnnnnnnnnnnnnnnnnnnnnnnnnnnnnnnnnnnnnnnnnnnnnnnnnnnnnnnncgtactagcagcttgtttatatatatcacctggtagctagctgctgcagggctagatgcaatgcgtagcttgtaaggccgaccaagcatcatcagaggacgctgcatgcatgcacgtaaaagcaaccaaattcctacaggaattgagtgcaatcagcatataatataaacttcgccctaattgcaatcttgctcggtgcatcacaaggatcgagtttgatcacccactattccctccatcatacgtatgatttccttcagaaatatgaatttcaggaggatatgatcagtcagtagggtacgtaaaggaagagagttgtatctagaccggcgacgacgcacgtaaatctcagggcgcgagatcaattacttaccaatttcaatccttattatgtcataggagaatgatgcactctctctctctctgtaaacttttataagacgtttcaaatcacgaattattccacctagctaattaaagacaggcccaggccgctcctaaacatagcagatacaggaccaacagatagatatgtgagagggtgacgtttcgtcttcctgccgaccttgtgctacacgtttcatactgtacaaaaactgaggttgacttgaatgaccagtcggcagctaagattggttactgctgaaaatgatttcaaggctagggctgctgcatctgcgtctgcacgcgcgtgtccacatcatgtgtagtcgatctcccagctgatcaggtcgaagtccctctcgttccaaaatagtagtactactactaattttctcatgacacgtgactatgctcttccatttgtgcatttgtttagttccaggtttttcaacccaagctttccatattctcaaagaaataatgtgtactagcaactaagcagatcagacaagagggcatcaaccaacaacttgcatgcatcatgtaatgacccatatctcaccataatctaattggtcaagcatacgagaatccaatcattgtgacatgaccaagaaatatatgttttttttcctgttctggtttataaattatgtccatcttgggaaatcaaataaataccttccttcgcctggttacccactctagctagggtacctatagatattccatcgaaaataatttcatgtcattacattcgtaataaatttcacaagcagcatttagagaaagcaaggagtgagcaagaacattgtctgtgttcccggaaatacaaagtccatgtcaatggcaaataaatgtttttgtgagggaatggcaaataatgttaatggaaatctcagtaagaaccaaggttttggttaccggtcgagattttgagatttcccatggttaccgcgtttctccgtgcccctcggtaaatcgccataccgaacaaaaaataccaattttttttgaatttttcgaatttaaacacttgatttatagtaaagtacgtaggatctacttaatgccatgatagttggttctggcgtgttagtagcaacatagttcttattttgagaggtctctggttcaaatgttcgttcattcacttatttgaattcaaaattcaactataaaattcattcgaaatattctcggtaaccgtggtaaccgtgtttaccagcccccctgggtaaaaatgccttattcggtaacgaaaaccgaatataaatcaagtggatcctacgtacttggtatttgaattgtcacggtcatgacctaaataatgataatatatatttattttctcctaattaaagacatggaggtccaggtccatgctcctaaatttagtagatacaggaccaagagatatgccagacagcttcatgtcgagcttgtggtacacgtttggttttcattttctcatgctagctaaatataacaggtgaggttgaatttgatcacttgtactccctacgtcccataacattagatgttttgttttttgcaagctactgaaatagcttgcaaaaacatcttatattgtgggatggaaggagtatagtagnnnnnnnnnnnnnnnnnnnnnnnnnnnnnnnnnnnnnnnnnnnnnnnnnnnnnnnnnnnnnnnnnnnnnnnnnnnnnnnnnnnnnnnnnnnnnnnnnnnnnnnnnnnnnnnnnnnnnnnnnnnnnnnnnnnnnnaagatagtcatattgattactgctgaaaatggttggaagctagggctgctgcatctgtctgcccaagtcatccccatggaccccatcatgtctccctggtcatcagaagtccctgccattaattcctacatgaacttcttaattgtacacgtgacatgcatacgtagcatagtccaagtttcaaactaaggtttcaatcttgtcaaaggaatcaattaagcaacgaccaatgaggcaagagagcggcaagatatgcatgcatgcatgctaatccaccacattccaccataatctaattaatctaatcgagcacaggagcatccaatcgtcgtgacgtgaccagcaaataatctgtgaagaacgcacttgtttttttctattcttcagttatttttgttatataaaaaaaaatgggcagcttgcaattgcaagatgccttcctttgcccggccacgcactccagccagggttcttcttccagcaaggtagttgcatccgcacgcacaagccgcgtacaaacaaatcatggaccaccgtacaatgtcatgccacgcaccgtacgcaacggacgatcgggacaatggagaaaccgcgtcggcgggaccggccggatgcatgcgtcttcaccggcgacatcccgccacgtggccgcatgcaatgatgcaatgacgacctcagctcgatcgggtcttccttccacgtgcatcacgcttccccttccttctcactcatgtcaaaacttgtgagaatgttgaattctcacaagacaaacgaaaatggtcctcatgtttaaggnnnnnnnnnnnnnnnnnnnnnnnnnnnnngagcaataccatacccatacccgtatagtcaatgggtacaaaattctacccatatccgtacccatgggtatgaaactgnnnnnnnnnnnnnnnnnnnnnnnnnnnnnnnnnnnntgggtacccaacgggtagaacaaatagtacataatttgttcataattttacgctcattgatagcacatttgacaaaaaaatcaattatctcagctaaataataggtagatgagtaaatgactgatataaaaatttagaaaccataacatactcttaagtcaatgggagtagacgagtcacatgataaattaatgactaattgatgacaaaataacattatttcacaannnnnnnnnnnnnnnnnnnnnnnnnnnnnnnnnnnnnnnnnnnnnnnnnnnnnnnngacttannnnnnnnnnnnnnnnnnnnnnnnnnnnnnnnnnnnnnnnnnnnnnnnnnnnnnnnngcgggtacggtacccgcaggtgcccgtacccatgggtaaaattgccatccttactcatgtttaatcagtgtcctggtgaaatcaccaaagcaacccttctttgaaatgctaaagggaatttagccgacacccatgcatattcgagagctcaagacagaccgatgttctttccaaaacgaaagctggtttatatgatatcaataagacatcaggtgcaatcttatacgacgggtggcaactgaacctagagacacgtagatgttgttttcgaaatgaagatgcaagtgagcctgtcgtcgttgcagcaccgtagatcatactgacaatatactggacaacatgaagaaatccagccaccgaaatacccgcaaagacattcaagggacaacgccgccggaatagtaaactaccgcgtaggacggggaccgacaatcatatcggcgaggggatcaccctgagagttaaggcagacaaccgcggtagcatcatcaaaccaagccgatgttggaactatttttctttttttattattatagtgtagatagagaaatccaacatatagatcacaaaaaaatgatttgccatctactgtatataccctaataaatcttgtaatagtaggtccatggccgacatggcagaccatgtgctcgcattcgcattcccctcgggggtgggccccgcatgtcagggcgtcgggtacaannnnnnnnnnnnnnnnnnnnnnnnnnnnnnnnnnnncagctccccgctataataccttcacctaaaaataatatgatgacgagctcgacggaagcagctcccggtcgccgtcgtggggnnnnnnnnnnnnnnnnnnnnnnnnnnnnnnnnnnnnnnnnnnnnnnnnnnnnnnnnnnnnngcagcagcatccgtgtggggcggaggccgagatttcctcctccgagcgcgccgaatccagccccgtaagtccaaatctccgtgcgtttctctcctgttcttgctctccaatcccctcccctgccgccaatgcccgccgtttccccgtttcttgggccctcgggacaggaatccgagctcaagctgcgctcttgccctcccctactggctgtggactgaccccccggcaatggcggccccggccgccgtgccgtcgccgccgggcctactcccgccggtcctcgagctgttcgaccggtggccnnnnnnnnnnnnnnnnnnnnnnnnnnnnnnnnnnnntggtcttagtggtttcactccgttccgtttatggtcagttgctcaactgacgaaatgccgaaatttgtgtcagttggtttgacccaaatctgtgcacgcaaatgcttccatttttgcaggcaaatgttgcttttttgcaggaagcaaccttgagcattactagtagtatcctggcgtttctttgttcgcttgctgtccgtctgattgacaagagaaaaggggtgaagcaaggaatagaatagataccttgttgcataatccaaagttcggcacctgcggcttttgttctctctccctctccctctcggcgtagcaatggtgtgtaccttcttcctgggagtagtatgagcggatggcataaatggcacaaaccagatgttccgttgcttactagaaatgggtgtttttcacattcttgttaacgagtttggtagaatcatctgccgttgttcttttaaactgcttttctttgcgaatgttgtgcggatgacataaatggcacagatcaaatgttgtgttgcttactagaaatggctgtttttcacattcttgttaacgatttggtagaatcatctgttgtggttcttttaagttgctcttctttgcgacattcagtccgacggttttttaattgcttccttcagattggcacttgcttctttgttactgtttttcttccaacatttggattgaccccctaccggctgtggattgatctcccggtaatggcagccctggttgttgtgatggtgttaccactgggtcttagcccgctcacatagtgttcggctgattgcctccttacggtgtcctccatcctggtctcctttgagttcttcactccgtttatcgtcagttgctaaatggctgaaatgctggaatctgtgcttagctggtttggtactttgctcggctggcatcttaggctgtgtttcctttttgcaggaagcacccttaagcagagtatcctggtataatatgtttgtttgtttgctgtctgatggttgacacaaggggttaaggataagaataaataccttatacgttgcataatccaaagtttgttccctgcatagcaatagtgtgtgcaaactgaaatctgttgagagcagttggtccacaccacacgtttggcttttaattcaaggaccataatgatttttggttttcttggatgagtatatgtgaacaaaaatgctggatgcttgccggcccaacctacaatctgtatcttcttcctaggagcagtataagcggataacatcaatggcacaaaccgaaatgttctgtcgcttactacaaatagattgtattcattcttatcgtgtttggttgaaacatctgttgttgctcagttcagttccttttttttttgcaatattcagtccgtttgtttcttaatacagctagtgcatccttcaaattattatttgcttctttgttactgttttttttttcctttggacgtttgaactgaggcttcaaatgttggtactgtctacaccgactaagttactttggggaatacaagaactacgcattcgtatcacaataacatctggtctgtgattttttcttacagggggatcccaagtcattaataatctgctaagatgcgaataagcatccagtagcctttgcaccgtttgagggacaatggggatagcttttcccatgctgttggttctctctctgctcctgttctctaatggcatctctaagagcttagctgcaaggcctccagttgtgaatattgggtctattcttcaattgaactccaccactggaggtgttgcggcgattgccatcgatgcagccttggaagatatcaactctgatccaacagttctaaatggaacaacattaaaggtcgaaaccaaggatacaaattgctttgatggtttccttggcatggttcaaggtagactagctttaacatcatcattttgtatcgttaaaatagttgattctgttctggagttgtgacaatgatatcgtattccttgtatcagctttgcagttcatggagactgatgttattgcaatcgttggcccccagtgctccgcaattgctcatatcatttcatatgtagcaaatgagctccgagtccccttgatgtcctttgcgtctgatgctactctttcatcgatacagttcccattctttgtcaggactgctcccagtgatctctatcaaatggcggctgtggcagcagttgtggactacaaccactggaagatagtgactgccatatatgttgatgatgattatggtcgaaatggcattgctgctttggatgacgcactcactgcgaagcgctgcaaaatctcctacaagattggatttcctgcaaatgctaaaaagagtgagctcattaatttgttggttagtgtcagttatatggaatctcgcgttatcatcctccatactggtgctgaacctggactcaagcttttctctatggcaaaccgactaaacatgatgggtaatggctatgtatggattgcaactgactggctttctgcatatcttgatgctaattcatcagttcctgctgagactatatctggtatgcaaggtgttcttactttacggccacatatccccagttcaaagatgaagagtaatttaatctccaagtggagcaggcaaagtcagaagtacaaccatagtgatcttcatgtaaatacttatggtttttatgtttatgatagtgtatggacagtagctcgggctctggatgccttcttcgatgatggtggtagcatttccttctcaaatgactcgcggttgcgtgatgcaactgggggaactcttcaccttgaagcaatgagtatttttgacaagggaaagaaattattggagaagattagaaaggtaaacttcactgggccgtctgggcacgtgcaatttgatgcttcaggtgacctcattcatcctgcatatgagatcataaacgtcatcggaaatggcatgcggaccattggtttttggtcaaactattctggcttgttgtcaactgtccctccagaggctctatattcaaagcccccaaatacttctctagccaatcagcaactctatgatgttatttggcctgggcagactgcacagaggcctcgaggatgggttttcccttctaatgccaaggagttgaaaattggtattcccaacagattcagcttcagggagtttgtcacgaaagacaatgttaccgggtcaatgaagggttattgcattgatgtctttactcaggcattggctttgcttccttatcctgttacctacaagtttgtaccttttgggagtggtactgaaaatcctcattatgacaaactcatacagatggttgaatcaaatgtaagtatctatgttttttttcccctttttctacacattccatcataccgtactgaccaggtttatcttattctgcaggagcttgatggagctgtaggggatatcgcagttacaatgaagcgcacagtaaatgctgatttcacccagcctttcattgaaacaggattggttatcttggctccggttaaaaggcacataacaacgtcatgggcattcttgcagccatttactttggagatgtggtgtgttacagggttgttctttcttgttgtgggtgtggttgtttgggttctcgaacatcgaatcaatgatgagttccgcggctcgccacgagaacaattgataactattttctggtgaggagcttacctgcaccttttgtttcatcttcctgtataccagttttgttttcttagaaatgtcaaggccgcaagaagtcttgtgtaacatgtttcatacagcaagcaccttagaacaattgccagttaacgcacccacatgaagcatccagtgattatgaattaactattatcttgtggtgagagatatatatgatgcattgattttattttcttctgtttttacatactcttgtcaaatgctcttatcacagagtcattccttgctctcaaaactgtgattataatctcaattttttattgtctgcaggttcagcttttcgactttgttctttgcacacagtgagtaaaccaaccttctattatgtgttttttggctatatataaaaagtaattttattctgagtcacatgactcatgattttcatctgtatctgttcccaggagaaaatactatgagcaccttagggcgcggcgtgttaatcatatggctgtttgttgttttgatcattcaatccagctataccgcgagtcttacttccatcctgaccgtgcaacaacttgatacttctataaaaggaatcgatgacctgaaaaatagcgatgctcctgttggtttccaagttggttcttttgcacaagactacatggttaatgaactgaacatctcacggtcaaggttaagagctctcggttccccaaaagaatatgctaaagccctcgaacttggccctaagaaaggaggtgttatggccatcgttgacgagcgcccctatgttgaactgtttttgtcaacttactgcaagattgcggtagctggctcagatttcaccagcagaggatggggctttgtaagtacatttaaactaagttatttaacatagcttcgaaatacaaggatacaagattttggtgttgaaatcctgaaacagcagttttaacttccaatagttgtgtatgctgtctagtannnnnnnnnnnnnnnnnnnnnnnnnnnnnnnnnnnnnnnnnatgtaacctttcttgcacttcttttactggtgaaatctaaaatctacacctgctttaatttcacgaatagcaccttacaaaagttcattctgccaggcatttccaagggactcccctctgcaagtggacctgtcgaccgcgatcctgtcactgtcagagaacggggagctgcagcggatccacgacaagtggctcaagacaggcgagtgcgcagccgacgaaagcgagatgatcaactcgaaccagctccggctcgagagcttctggggcctgttcctcatctgcggcgtggcgtgcgtcatctcgctgctcatctacttcggcatcatgctgcgcaagtacatgaggcacgagccgaagaagagcctccggaggttcatctcgttcgtcgacgacaaggagccgccgaagaaccggaagaagcggtccatgagcctgcctgcgagcgcggcggccacggcgccgatggccgccctcgacgttgagaggccggccaggaacggcggcagcgtcattgatatagaaggctagttcatgtgtacaaaagctaagacattatatgtatacgttttcgacccgaggtagtacgctgttcttcgggtcagcttacccgatctaatggagggagaaatagattcagacattcagaggctgtgtaggggagattgttctgtaggttcctggcaactgggaacttgtatataagcctgttcttgtccttgatggtgttgtgaatggaagtaatgtgtttgtgtgagtgccttttttttttcttcttcttcagagtttacctaccttagtcctgaatggatgtgagcaggcaggtcttccatttaatttcgtttttgggaaattgcagagatttgaacttctgtatcccctttttttttaatgttttggttggaagtgcagttagttacaaggataatctctgcaaaagaaaaaaaaaccatcacctttactatttgggaactgaacatgccagactattaacaggtattttgcatcgaatactggatttttctcccctcacatcacaaataccgcactttgtattattttgtgaacggtataaactaattttactattattttgtgaacggtataaactaattttacaggcaattacaaagacaccggtaatgaaataaatatgaacgaatgcataagaggggaaataaacaccacacaatgtggtttgtcaacattgtaagaaaatcaatctaagcaaagcatctcaaaaaatttaatgaattaggagtaaacaataaggcataaaatggggaaaatggaatattctgatttttctgcaccctgccgtttatggatatgctgatgtggtggcaggcaggcggccgagcgcgcgccatttcgacccaccatcatccttcctccatgcctcctgctccgccgtccatggctccctccgccctgccttccagaaccttccgcccccgccaccctcttccctccccggcaccctctcctcctcctccctcgatcgtcgcctgctgcgtctcccggcggcgggcggccgcgcagctcctcctctcggccggcctcctgaccgccgtctcgtcctcgccgccgccacccgcgctcgccgccaggaggggccgccggaccatagcgccggaggactacgcgtccacacgtacgcccgcgagcctcctccccccgcgcccttggttcctgctcggatttccgcccaaaaaattgggcctttccggctgaattctgaagctgactagtcccatacagtgtttcattatcttttttaactgtcaatttatccatgtgatattaagaactgcatattatgtttacaatcaaagttacagtctccccgttccataaatcatcactacttattacattggttaaattaaactccgggttcgagtaatctgatgtgagaactattggtggcagctgatggcctgaagtactttgatctcattgaagggaagggcccaactgccgagaagggatcaactgtccaggtaatcagttcagccctgctcttcattcttgtactcaaactgctcttcagtctctaactgaaactggttgcgactggtgttcttctcaaggttcatttcgactgcatataccgtagcatcaccgtggtgtcgagccgcgaggccaagctcctggcggggaaccggagcatcgcgcaggttatgtggcaaaatactcctgtcaccgtatatggtagtgctgctggtttagcgcggtaggaactaagatttctgtctgccttcctctagtagccctatgtgttcactgtcggatcgctgcctggcaaagagcggaagcgcgatttcgcggacaccgccaacgggctgttctccgcgcaggcttcgccgaagcctccacgggccatgtacatgataaccgaggggatgaaagttggggggaaggtatggacaagcagaactagcacgagtgaagaataatcgggtgttttttgtcttcggcatgataactgacctgatcttgtgctctgtttgtgtgttggttatgcagaggagggtgattgtccctccagacctgggttatgggaaaaaggggcagggcgagataccggtaaaacctcggtttcttctagtttgatgattgagcatctgagtgcattcagctattgatgagttatataattctatcctgctttgcaggctgatgctagttttgaactggatatagagcttttggaagtgatccctcctgcagacagttgaccatttttgcttacacatggaaaagactgatgaggtacctgtgaagcttcacaaattttagagggatgtatttgctttatacttttttcgttcttatcaacgagagctgtaaccgagaatatgttaatattatatttcggctggacatatatcgaaacgttgggacgcaaagcttttgcgttttgtcgattttgcttgtttgccctgaaagggcttgtttctaacaagtagtaaaatctaagattagaagcaaaacttaagtaggtagaaatcttcgcttcaatgtatttatgttgaagcaaaactgtatcacagatgttcaccacaatgtcatggtgcatgtatgactcttatggcagattctatatagtaaaattgatctgccattgtgatgtcagcatgtttctgatgctcgtttaaaggtcctcagggccgttgatatcctgaaataaaagaacaaagtatattttgttatagcaaaagatggatggtgctagcagcttaatttttgattgggacatatgaatggacatctcaaataaggttttagtttgttacccagaaactaaatgatgaaatttattcatttatgtaaacttctgattattaatgatgtcagtaattctttcgtttaatttgaaacttattccaatgctgataaacaagtaaacagacaagaactaagatctatgttgcttttaaactgctgaattcatgaaacaccaatgagaacatgcatcttgggaaagataccttgttctcaatcacttttccatctgggatttccagcttaacaccaggttttgctgtgatggtcaccttgccctacaaaagttataaaaaaaacatacatctttactccaagttttaaaaactttgacatgtatatcttcataaatagccataagtcataacagcaatcatatgagaagcgaagctacacattgtccaggtaatgcatgcattgacaatagcaggtcataaatagtctgaacatgttgtctaagaactgcaactacagtaaagattgtaacaattcaacaactttgtctgaataccttcagcacgatgccagaaccaaaccaaacatcaccggaaaccttcaagctgtcaagctcaacaatgctaggaatcgacttgaagcggccaaggaagcacccaacctgccagtgcatgtataaacaagatgggcttatttatatttggagtttaaaagttaatggtaaaactatttcgttctggcgaggagttagtgttggagcctgaccttcttgaactcagggccaagctcaattgagggatttgatgggtttgatctagctgaattgcgtgtaacgaagccatcaaccaaggtatacagatccgactgcagggcaaaagtaatttgagttagaattatgagtgttaacttaaagaatttgttcagcatatagcacaaacctgtactagctgcaaatctgatgttgccttcaccggtaggaaccgggacctcggaacattcatgccgattgcgtggtcaaagaactgattcaaaaaatatatgatttgtcatatttattgtagcataaggctatgattatgggtatataggtcagtagtagtttgttagtaccctgatcgcggcaccagctgcagtttccaactgaaggactttcacgccctcaacttcctgaaatgattttgttgcccatcacaatatttgttaaattcttcataaatcttaagtaaaactaacaaagctcatggagcaatcctggcgtgaaataattctctaaaatgcattattaccttcgggtttggaatgatctccatcttgagtgcatcagcctcgacaaggcgtttgatagcctttaagctcacccatctataaaagcaggtagtagtgttatataacaatgaaatggtctttataaaactgaaatgaaaaactatgaatacacatacagattgttggtgttgaagatcttgaatttctcaattgacttgaactcattgacctaggtttcagaaaaatgtggaagcaatctcagaaaagatgcacagtaattgctgcggcgctgtctggttttttgatcatttattatgccattgcagtttctagtttatgacttacatgtgcatcaggaacctgtgcaatctccagaagctgaaaaaatagaagggaaaattgttgtcgttatgtttccagacgcaattcgccactatcattcatgaaattggtttgcaaacttatgcggctacataggagaaatataagctaacctgaaccctcccttcatatgagatcagtgtgccacctttcacatcggccaaagttttcggggtaacctgaaggaaggctgttaatcttctttaccaacaaaccaaattcaatctatcttcaatgtgtattatgattgtacatacctccatgcagtattcattctgcttctggatcaagtggttcagtatctctattcaacagttaagtaaataagcaaggtgtcctttttcttacaactggaatttttttgtcaaaagtaaatattgaatatcatgtttatgtaaggatactcatgtcaactatagcgcccaagttatctgagtttgcgatgaaaacatattcttttccctgcaatagtgtaaaaacataacaataatgttactacacgcgtggaaactttgggtgagaacttttccccagatgattgcaaacctgtgagagtagtaaatcgagcttgccgctgttcatcagggatgggaagatgtcaccatggccaggagggtaccttcatatatttgtgtaacaaagatgtggttaaatttacactgattattgttagactagaatttgctgatctgatgacgcatgaatgtctcaccagccatccttgtcagtcttccccttggaaggccacggcaagaactcgtcggccacgacacgaggatactggctctgcatatcagaacagaattggcaaatgtcatgagtatatatacctgactgaaacaccaaagcagagtctgtcttaacatacctggttgaacgtatggatttggatgtttgaattggcgtatttctcgacgatctgcggcgcaaaatgtactaactaatcagcacggtgagggaaaaatgtttttcaaacaggcttccaaccgcgaatatcgtggggagagattcgggtgacggcgattgatctaccttcgaggtgtcgtcgtgggtgttgaaggagttcatcaggagcagcggcacgttgctgccgtacttcttgttcagggactgcaaaaggaaacagtgtcagtgaatgcagccttacaaaaacaggtagagcagcagcatttgcttcggatctcaaagaaaagaaggaacaatggatgatcatgcatgcatgatgctcaaccccggcccctacctcgatctggaccacgatgaggtcgaggaaggtgaacccgtttcgcacctcgatgaccgacctgaaatgttcgtcgagagatcaatgtactgattgtcagcaccatgtatgtggataagatgaatgtggcggcttactttgggcctgtgcaccccatggtggtccccaggccgccattgagcttgagcacggcgagcttgtcgagcagcgccttggtcgctgcgaggtctgcaaattttgttttcaggagacagggtcaccacaaaattcagtttcgtgtcnnnnnnnnnnnnnnnnnnnnnnnnnnnnnnnntgtctcatcggcgcgcaccttccggcggggctgctagggtgtcgtacggcaccaccacctcgtcggtgggcgtgtggatcttgccccactcgatttgctcctcgttgccgcttctcgcggccaaaggaaaaccaaccatgatcagaagtcagaacaacacccacgccatgggtgatgatgaacgggagcagaaccatcggtgatgcaacacagagaaagagagattacctgaggtagcgggagacgaggctgatgaacccggacttctccttgtcgctgcacgcaaggcagcacagagaaattaagcaggcgatccatcgggcaagacagacgtacagataaagacatgcggcaatggcgccggctggcgtccgattgacagggagagagcgaccgacctgatctggccgaggccggtgacggcctcgcggagcttggcgagcttctcgtccgccattgtcgatgcgagagagagcgcttggcttggcgcgtgtgcggggagagatgtgcgtgagaagaggaggatcgaggacggtcggaggtaggagaaggagatggcgctggctatttatacaaggaaaacaggggcgcgaaagaaggggacgcgcgcgaagttaacggccggaccgttaacagctttgcccctcaaaaaaaatcttgacggcttaaaattgatagtnnnnnnnnnnnnnnnnnnnnnnnnnnnnnnnnnnnnnnnnnnnnnnnnnnnnnnnnnnnnnnnnnnnnnnnnnnnnnnnnnnnnnnnnnnnnnnnaattgaaaaaatattggttcccaatagctcttatctatctcttatttaaagaggtcgtaaggtcatatattaagtatcacaattccataaaaacacccttacagaaaatagaaatatattaaaatatggggtgcctcagtactttttctcttggatccactgacggcgtgccatgagcacagctcgatgccgcctctgggcctccgcctcaatggagcaagctttttggaatccagaagcttgtagaagcagcggaagagaagtcgtcgatgctgaccaggagatgtcaacagccacaatctacggagcaaaaagtcgcgccggagaaaaaacatcaataagggcctgtatgaactccaaatctcacgaaagccggttgagtccagaggagtccaccggaaacctaaacgnnnnnnnnnnnnnnnnnnnnnnnnnnnnnnnnnnnnnnnnnnnnnnnnnnnnnnnnnnnnnnnnnnnnnnnnnnnnnnnnnnnnnnnnnnnnnnnnnnnnnntaacttggggcaatgccactgattcatcgccccacaccaaacatgatgactcccttaagaaaatctggaaaaaaatcacccatgccattgtacgactggttcgagtttgctgccgagcttgctgccgtccaaaaccatgcacccacgccctgttcttcggcgatccagccaaaccgagccaccagtgaagatctccatgctagatccctcctgcttcaccaacgttgtcgtcgcgcaccacctgacgaagaccgtcggtagagcacatatcttcttcgccgtcccacaacaaccctccaacaccttgacagcagaccctgatctggacctcccctctgccgctggcgccgctggggctttgcctgatggtgagaggggaaaatgtcaggtggcggctagggtttttgagttgcctgtcttagaaaatgatttgctgaaattacccgttgtttgtcactagctcttatctatgagatttaaccaagtctcatctaaataacatcaacataaaaagttggtgtttgttttttttcattattttttctctttcacttttacctttttcctcatttttgttctctttcttgacccttttatactctatttcttctcttgaaaaaatacgcaaggacacttgcgcacatagtagggggtgcaactttaattgttcatgatccgtggacatgcagttgcgcacaataaggacatgcaactatagttgcgcgccgataaacggacgtggaagcgtgcttgcaagcatagtgagaaaagaagtgcaactaaatttctggtacttttctaaggaaagaaaacaagatcctgagaggtggatggagaaaaagctcaaatatggcttcaccagtgattaaaaaaaacaggcatagctaaaaaacataggaaaaaggcatgactacagaaagaaacttcgagtatacaagagattgtgcggtcataaattctaaatccatccgtaaactaatataatttttnnnnnnnnnnnnnnnnnnnnnnnnnnnnnnnnnnnnnnnnnnnnnnnnnnnnnnnnnnnnnnnnnnnnnnnnnnnnnnnnnnnnnnnnnnnnnnnncagacggagtatttaattaacttgtatactaatgtgaatataaaaatgcttttgcaatgaaaccagcatataaaacaatggaaatacacaattactacaaaacaagggcaatcaaaagtattaggagtatgagcaacatggcttggcatatcctgctcaaagcaacaacctcgagaccgagcactaactagagaggcagcggaagagatgcacgccatcggagatgcgtacctcaagtttataggggaacatggagcacaaaaagaagcctcgactcgagaaatccagatcaatagccttgaataaacaagctagnnnnnnnnnnnnnnnnnnnnnnnnnnnnnnnnnnnnnnnnnnnnnnnnnnnnnnnnnnnnnnnnnnnnnnnnnnnnnnnnnnnnnnnnnnnnnnnnnnnnnnctgcataataaaaaatgtatgtatagtttcagttagtaatttttcttagagcaaggtttccttacaactgtatcaaataaatgcaaagccatgttgttctgcaacagtagcacttgagcaagttctgtaacagtgtaattgtttttccgttctcaaaactgtgcacatgcaggcaacattacttcatgattcaggtaaaccaatggacctgaagttgtagagagtttcaacagttccttttcttcttctttttttctaaggataatgtggacgcattagaatatctgcacaacaccggtgcctcattaagatgaggataatgatggcttgctctgctctacaattgtgaaaccaaatatggaaagagatggtgtgcaaagtgacataacagcagtaagatggtatttgtgcaaagcgtacttgcttgaaaacagttctagctgttgttttccaaaatgaagttaagttgaaagcaattaaatgacttgactcgaattcgacagagatggcatatgaatactcttccttcccaacctccagcaacaattccgtaccaccatccagcaccgtgaattgcaaaacaggaatcgtgccattcatcatcgtattcaagcnnnnnnnnnnnnnnnnnnnnnnnnnnnnggggctgcagatcttacacacctaaacgatcaggattttaccatctgtatgtatgtacaaacaaaagaacaataccagcaggccattcctggtctcctatgctgtctaacctttcatctactgtgcttctgtcacgttacattcatgcgccgatgtatacacagacatggaggaagcattcggggttcctcaggttgttggccacccagaggaacggcgtatccaggccgagcgccatgccttgtatcctcaccagcttcactcgggccttcttggccacatccatctcctgtggactcgccgaagctggttctctgtcacgaggagtccctggagtggtctctgaaccgttgggtggagagtctggtgttgctgccgcaggttcaggaccagcagcttcactctggtagcaacgtctccaaggcatgttccagggtagttatccttctacctgcaaaacagcacgatgagtcaaggaaatctcgctgttatcgcagcaccataaccatcacgaagcaaagaatgtgagcggaaggcagttggtaacatgtagtttggacagtttcaggggtgattatactcggtcacacttgtttcctcgttaaagataacaaaatgttagacccagtaatttacagccctttgccctggcttgctcaaaagaagtcgcaaagcagaaggttaaatagtgtagcagtgtctttacaatagatggataaatattcgctcaaaataacagaagctgcaccagtttcccaatggaagaaatgtacatgtgcatgcttccttatttggggataacctccagatggtggcaatacaaaatatttacgtaatatttttctgaaaagcactactacatggtcggtgattacgacaagcaaaatccttcctccctcaatactggcattcaaatgataacataaatgttggcagcagagctacatacctccctcctttcggatctcgaatgggcgatttatataggatacactttcccagtcactgacaggaatcgcttcttctaaatactcaaggtcttcttgaactctgcgcacgtataatcgaacaggtaccctgcctaaccaggtattaattgaatagatctatcagagcaatgatttcttaatgtggcacaaatccatttttataatagccgtattttaatgtcatacgaacccaataatgtataggtccatcattgtataacttgaaagtgtatatgaagttttaaaaatgtgaaaagcatgcaacaattagctaatataaaaaaaatgcccaggcaaaaaaaattggtatgaaatgttcagctaatacaaaagtagaaaactcaatgacagaagaccatacatggtttgacagatccaggagattcaggctcatcagaaccttgtcgaggctctaacgatgaagtccagaagtgatcttcaaacggtccaagcttaagcttggtagagatattcatataactatccacgtctcctataacaagtaataacaaaataacacgtctgtagtcaaagcatgaatgaaggtcacaagcattgagagaatggatctgccacaaatggtagaaactaggtatacttcagacagaaaggtagtttgggagcatacttttcctcaccgattcccacagagcaagttgatcagcctgggacatattcatcacattcttactgtttccagttatgatgaaggcagcctgaacaagagaaaatattacattattgtttgagatcggaagaaagagttgttgcataacactagttctcaaaacgaacctctttcagggaattgttgtagttccactttacactatcctcaccttcacatggtgataatatatctgcaggataccccctaaaatgaacctacaaattttatgcgtaagttgtctgcacggcgaacaactggagcaagtaacagggaaaaacacatatagaaacagaatagcggattcatgcaaatgactcatgttccctgaaagactaatttttcaaaaaaaaatacaattgaaaatgtaccctgtaagagtagatggttgtaaacttagttttctactattcatacactgatggatggctgattgcaattaagcaaggattacaaaaaaatgtggcatgcatataaatatttttgcactctaattggtaatttattgaacttacttgctaagttaagtaacgaactagatcctgagaacattatggcataaatctctaacagtatttccagcaaacttaaacattaagagaaagtgcacatttttcatcaaaaggtttctactactccagtatcacattatggcataaatgaaccttcaacaccagaaaaacaccttgcaaattaaacaagaataaacaaaacataaaagaaaaggtgtataaacaaaagtcctagaggactcacagtcttaccgttagattccatggcctttctggttctgcacaaagaaggtcgaaaagaacaccaatgggtatatacctaacaatgcgaagataaaaagggctgtcagcaaataaaagcgacagcaataacatgggttctcaagatttaataaggcgatagaccatcattaatattagtaggagataacatatgtcaccatttcagcggcagccctttatactcaaaccaaacagtatcgacgcctggtgggagtgaactgctgaaatgagcctttataattgacaccaagagtgggaaatacccaattcttggcccaaaaagctgtcgtagacaaaataaagatcaataaatgaaacaaacactcctatgggaaggaagatgaatgctctggcaggggtgaaaatagcaatagtgtagcgtacagaggtatcgtcttattttgttacgcttgcggataagaagaaaagaaacagtggcaatcatgtggaaactctatgcaacaacagatgccaacaaaaaacgagcagcaattatctcgcataccactatcagctcaggttttaagctaaaataggttgcaatgtgaaagaggaatacagcagtatattttgtccatacagcaaatatatattcagcttcagcatatcaaacataagcacagcatgcctgcggcaaacttagcctcttacataaacaggagacaaaacatacttcaaaagatcatgcaagctactaactgataacttcatgcttctgacgaaccacaagcagaatcaactcaactccatgctcatatgcgagacactactagtcccnnnnnnnnnnnnnnnnnnnnnnnnnnnnnnnnnnnnnnnnnnnnnnnnnnnacaaaatttgtggagggtttgcctctaaaatttttaggcttttggagctcacgggcaggctggactaaaacctgtcagcaaccgtgatcctagcatccagaactggaatcgcgcggcgccgagatgtgggatttcggatggcgagcacagtcgatagagggtggcatcttacatggaagggcgggggcggtgggagcgcgggacgcggcgacgtcggcgtcgtgttggtcccccctggagcggcacgtcgccaatccagtgccaccccgccgcctcctccgaccacgcgtcccgcggcgccgccgacattgctcgcgccggcggaggacgccggaccggccccgcgcgcggtagggtcagccgagctcgccgccggcgatgcctcctccaccgccgccccgcgaaccaacctgcctcagctcggaagttcggaacttcggatgctttgcttctgcttgcggagagtaggattcttctgaagagggaggagttggagtcggggccccgcccggcccctctcttttttcttcacgttgccgcgatggatttgattcgatatccaccgtccgattctgaaacgtagttcatccgaatccagtctcttctccgaaaattccaaacataacagatccgaccacatataattaannnnnnnnnnnnnnnnnnnnnnnnnnnnnnnnnnnnnnnnnnnnnnnnnnnnnnnntatacttccatttttattttaaaaaatatatgtttagcctaccaaaacgttaaaaaaacgtcttatattttgaaattgaggtagtaaatgagtaacccaatatacaaaattaatgctagatcgaaaaaaaatgtgctttcacgaatccacctataccaattttgcatagagtaaggtatgccaacctcatagcctcgtcggtagcatacgagcccgagctgtggtttgaaccgaatgtgttcttgaaagctaaatttacagtgccaaaaaataagttttcaaagttgatgaacttgtaccgtagacgttgtttactcaaataggatgaagtaaacttaatatgggggcgcctcaatagactgtccgggacattggacccggctgcatgcggactcgggcgtgtgcctacctggtttgcatgccgactccgacgactcggttgtgggcctacccggctgcatgccgactcggtcattggattaggtccatgactacctacccggatgcctatatgttgaaggcgttggnnnnnnnnnnnnnnnnnnnnnnnnnnnnnnnnnnnnnnnnnnnnnnnnnnnnnnnnnnnnnnnnnnnnnnnnnnnnnnnnnnnnnnnnnnnnnnnnnnnnnnnnnnnnnnnnnnnnnnnnnnacggtgcgaagaagaaggcgtggacgaagctgcagtggtggagacatggggaccaacaggggnnnnnnnnnnnnnnnnnnntcaacatcagagatttgcgcctaactagctcatgaacagtgcaaagttagtgattttttattgctaaaaagcctattttacaacagtttggccctcccccaacatgttttgacaacatccggcccccctaatcctatttttctnnnnnnnnnnnnnnnnnnnnnnnnnnnnnnnnnnnnnnnnnnnnnnnnnnnnnnnnnnnnnnnnnnnnnnnnnnnnnnnnnnnnnnnnnnnnnnnnnnnnnnnnnnnnnnnnnnnnnnnnnnnnnnnnnnnnnnnnnnnnnnnnnnnnnnnnnnnnnnnnnnnnnnnnnnnnnnnnnnnnnnnnnnnnnnntttaccctatgatgtcattaccataattatgtttgtaataggcctcgggtgactggcgctcgaggagacgctcgccatctcctgccccacggcgcggtcgtagcccctnnnnnnnnnnnnnnnnnnnnnnnnnnnnnnnnnnnnnnnnnnnnnnnnnnnnnnnnnnnnctgctaagagatacgtaccgcccgacgccaccgggtactcggcgccttccgcgactaccgctccgggcggtggcccctctcgcggacgccaaggccctgccaagaagaagaagtgccgcggtcagggccgaggcaacccggcccccctgccacctccggtcccgggctcctccgctgccccggactccgtctccaaccgtccctgctccccttgcttcaattgcggggtggagggccactcgcaagtcaactgcaccaatcctccgtgctgctacatctgcaaggatcccgggcaccccgtgcttctgtgccctgaccgtcatgtgatgtcggagctcatgatgtacggccacggtatcaaggggctgggcttctttcacctagaggttcccgaactcccgtcggccaccccctcccttcaggcgatcgtcaccatggtcgacggggttgcctccccagagatgatcgaggctgagctcaaccacctctaccgtcggcagtgggactgggcggtcactccgaccgccggtcacatcttccacggtggtctttcccgacaccgtcagctatggctacgccatgcggagtggccggatcaccctcgccctcaaccagctcgtcgtcgacatcaccgagccagtcctggacgcccaggctgtggccgtcctggatactgcttggcttcttgtgggcgacctccccgacatcgcccggtctgagctcgtcatccgccagatgtccaagattctgggcaaggtggtggtggttgacgagctctctctccgcaatgaggaggaggtccgggtcaaggtcaagtgcttagactccaccaagcttcacgtcaccgttcgtgtgttcttcaacgaccagggatacgacctcaggatcgctcccgagccccccaaccatgtcggtcgcccccgcttcaccgacgatggtccccccggtggcagcccgggggctgacgacggctaccacggccgccaccggcccgctctcgccggtcgaaagacgaggagggatcagaggactctcactcccggtctcagtctcgctctccttcgcctccggccaccggggggcatgggcgtcaggttgccccaggtctgctcctcgaggctccgctcggctcgatgcccgagtcccccgaggccagtgatgcctccagcgtgggcttggtcgtctgccccgggtnnnnnnnnnnnnnnnnnnnnnnnnnnnnnnnnnnnnnnnnnnnnnnnnnnnnnnnnnnnnnnnnnnnnnnnnnnnnnnnnnnnngagtggaggtgacttccgcggtttcctcccctggcgctgtggtcaccgtcgctcctcggacctccgcggcgtcccgccactggcaacgggcatcagtgcagtcggggaggccccggttgtctcctgccagcctgcggctctcgtcgggacccctccttcacccccggcctcggctcctccttaggccacggcccctctcgtgggcttggccctgctcgtcgtcccacctgcgcctcttcttccgggcccgtctgcgcctccgtcgcctcctggctgtgggcttccccccgcggcagacctcggtacgggtgtgggatcactggtgaccaccccctggtcgtccagccccccccccccatccacgtgccgcggcctactctcgacgcggacggtcggcctcctctccggtgactgcctcccgccggagcacccggcttgacgcggcgcgccccgaggggagcctagcgctgcccattcacgagcgggctgagcttcgggcagctgcccggaacctggagccaggtacgcctacagtctctccctcggcatcttcttgttcattctctgttcatgagtcaattccgctcggccaccttgcgaaggtcgcgactgattccacgatcatctttaggggggaggttggtcccccgctagcccagattgaggccattagggcccgcgagatcctcgatggtcgactcgcggaggcccgagcatctctgctcgctcctcctgcgcaattgactgtgtcgggtgacgctgtcccgccccctcctcggagggccggtggcgttccccccttgtccgtgacggagctccggggccgcacccgctctcgcactgctgccctccgcgctcaaagtgcgtcccgcgtcctggtcaagcagcccctcaatggttgnnnnnnnnnnnnnnnnnnnnnnnnnnnnnnnnnnnnnnnnnnnnnnnnnnnnnnnnnnnnnnnnnnnnnnnnnnnnnnnnnnnnnnnnnnnnnnnnnnnnnnnnnnnnnnnnnnnnngcgcacggaattctccctctccgagcttgaccgtctcagcccccacctcttcgcctagcattggctcccttcnnnnnnnnnnnnnnnnnnnnnnnnnnnnnnnnnnnnnnnnnnnnnnnnnnnnnnnnnnnnnnnnnnnnnnnnnnnnnnnnnnnnnnnnnnnnnnnnnnnnnnnnnnnnnnnnnnnnnnnnnnnnnnnnnnnnnnnnnnnnnnnnnnnnnnnnnnnnnnnnnnnnnnnnnnnnnnnnnnnnnnnnnnnnnnnnnnnnnnnnnnnnnnnnnnnnnnnnnnnnnnnnnnnnnnnnnnnnnnnnnnnnnnnnnnnnnnnnnnnnnnnnnnnnnnnnnnnnnnnnnnnnnnnnnnnnnnnnnnnnnnnnnnnnnnnnnnnnnnnnnnnnnnnnnnnnnnnnnnnnnnnnnnnnnnnnnnnnnnnnnnnnnnnnnnnnnnnnnnnnnnnnnnnnnnnnnnnnnnnnnnnnnnnnnnnnnnnnnnnnnnnnnnnnnnnnnnnnnnnnnnnnnnnnnnnnnnnnnnnnnnnnnnnnnnnnnnnnnnnnnnnnnnnnnnnnnnnnnnnnnnnnnnnnnnnnnnnnnnnnnnnnnnnnnnnnnnnnnnnnnnnnnnnnnnnnnnnnnnnnnnnnnnnnnnnnnnnnnnnnnnnnnnnnnnnnnnnnnnnnnnnnnnnnnnnncatgttgagccctggggtcgaaacttggagtaaaagcctcctcaaagtcggtttcacccgaaaggcaagagtccttctcggactccagggctagacgccaggtttcccggcgtctaccccctagacgccagggttcctggtgtctagcctctggtctccgcaaaacttccttttgcactttccaaaagcctcgtgggctttcccctttggcccagataaagtgttctcgtgcccaaacatttcggggaacatccggaaccccttccggtgaattnnnnnnnnnnnnnnnnnnnnnnnnnnnnnnnnnnnnnnnnnnnnnnnnnnnnnnnnnnnnnnnnnnnnnnnnnnnnnnnnnnnnnnnnnnnnnnnnnnnnnnnnnnnnnnnnnnnnnnnnnnnnnnnnnnnnnnnnnnnnnnnnnnnnnnnnnnnnnnnnnnnnnnnnnnnnnnnnnnnnnnnnnnnnnnnnnnnnnnnnnnnnnnnnnnnnnnnnnnnnnnnnnnnnnnnnnnnnnnnnnnnnnnnnnnnnnnnnnnnnnnnnnnnnnnnnnnnnnnnnnnnnnnnnnnnnnnnnnnnnnnnnnnnnnnnnnnnnnnnnnnnnnnnnnnnnnnnnnnnnnnnnnnnnnnnnnnnnnnnnnnnnnnnnnnnnnnnnnnnnnnnnnnnnnnnnnnnnnnnnnnnnnnnnnnnnnnnnnnnnnnnnnnnnnnnnnnnnnnnnnnnnnnnnnnnnnnnnnnnnnnnnnnnnnnnnnnnnnnnnnnnnnnnnnnnnnnnnnnnnnnnnnnnnnnnnnnnnnnnnnnnnnnnnnnnnnnnnnnnnnnnnnnnnnnnnnnnnnnnnnnnnnnnnnnnnnnnnnnnnnnnnnnnnnnnnnnnnnnnnnnnnnnnnnnnnnnnnnnnnnnnnnnnnnnnnnnnnnnnnnnnnnnnnnnnnnnnnnnnnnnnnnnnnnnnnnnnnnnnnnnnnnnnnnnnnnnnnnnnnnnnnnnnnnnnnnnnnnnnnnnnnnnnnnnnnnnnnnnnnnnnnnnnnnnnnnnnnnnnnnnnnnnnnnnnnnnnnnnnnnnnnnnnnnnnnnnnnnnnnnnnnnnnnnnnnnnnnnnnnnnnnnnnnnnnnnnnnnnnnnnnnnnnnnnnnnnnnnnnnnnnnnnnnnnnnnnnnnnnnnnnnnnnnnnnnnnnnnnnnnnnnnnnnnnnnnnnnnnnnnnnnnnnnnnnnnnnnnnnnnnnnnnnnnnnnnnnnnnnnnnnnnnnnnnnnnnnnnnnnnnnnnnnnnnnnnnnnnnnnnnnnnnnnnnnnnnnnnnnnn

SEQ ID NO: 15 - DNA, 32664 bp, Artificial Sequence
  Scaffold 1937448
ttccgagtgattcgggtatttttcggagtaccggagagttacgggaattcgccggggagtatatgggccttattgggccatacgggaatagaggagagaggccaaaaggaaggaggcctgcgcccctcctctggtccgaattggacaaggggcgcagcccccctttccttcttcctctccccctctttccccttctcctattccaacaagggaggtggaatcctactaggactagggagtcctagtaggactccacacttggcgcgccccctcctagggccggcatcctcccccttgctcctttatatacgggggcaggggggcaccccatgacacacaagttgatctacggatcgttccttagccgtgtgcggtgcccccctccaccatattccacctcggtcgtatcgtcgcggagtttaggcgaagccctgcgccggtagagcatcatcatcgtcaccagccgtcgtgctgacagaactcatccccgacaccctgctggatcggagtccggggatcgtcatcgagctgaacgtgtgcagaacacggaggtgccgtacgttcggtacttggatcggtcggatcgtgaagacgtacgactacatcaaccgcgttgtcataacgcttccgctttcggtctacgagggtacgtggacacactctcccctctcgttgctatgcatcaccatgatcttgcgtgtgcgtaggaaattttttgaaattactacgttccccaacacctcctgggtgatctgaggtgtacgtagcacaagcattttcgttgtttgtgtctgtagttgaacctcctgcatggcaattgtagctattatttcatcgtggcaaatgtagttatgcttacatggcaactgcaagtaagcagttatgacaactatacatttatcagtaatgtatactatagtttccacataatggcagtatacctgcaaatatgatggcaactaaagttaattatcacgacatgaaaactgtatttatgcatacatgaaaactcttcataatcagtgatggcaactgaaacatgatcaatggtggaaactgcatatgccacatgatggcaagagcagtgaaacatgatggcaaatgtagttatcacaacatggcaaatgtaggtaccacatcatggcaactaaatttgccataacttggcaactgctagaccatcaccacatggcaattcattctgaatacacaagttatttttgtcccttgaccattcatggcaggtgctgttgccttgggattgtaaatgcattcattaaccatttactttctccattttctattctcacctgcataatacgttgatggcaggtctcccattgttagttgttgccatgcggtacacgcagttgctgcaaatgtcattttttagtaagtttccctgtttcataatatgatgttctttcttcatactttaccttgatttgcattctctttcgtccgatgtttgttgtcctgattgtgaggcactcgcatttactcctggcgcagttttgccatgggacctctgatggcaaagtataactccatgcaaatgtgtataacaaacatcatacgtttgtcattattctgccttcaaagatggcaaactatcctttttgcttgatacggaaacgcacccatgtctccatattcttgtagtggaggcagcaatggccccgatgaattgcggttgctgtagacatcccatggcgtcgatttgcggctgtctgaaaaaccaaggatacgaaccttcgcctgattccaccccaaaacctagatgcataacgcacagacacctgttgtgttagtttgcattctaccttgcataccctatcttcaatgagcatcacaaaaaatgtagcatctgattttcacttgtcaaactgatttttgggtggcaattggctgcctaatggcaaattcatccagactaatgaggcaaatattgttggaaccacatggcaaatcatgtggtccaaggcggaaactatttttttcccattcggatacatgcccagtgtttctccaaaagcaatccacttgaatttcactagttggcaactactgttggaaccacatggaagattagatgatgcaaaacagcaactaattttcccctctctcctatatctaccaacacacctaactgccatacatcccagcagatatgggataactttggatgaatacgtgtggcaattctggcttttagagacagcagtcaccccttcgatatcaattcgtgtgttaggcatggcaattcgccaaatctcaaattttcaaaccatactgagatatgggatgtgagggtagagacgacagagtgagggcggcaactgcaggtcgtattacaaaaaatgggttccttgacgtattcttggtctacgattttggcgtagtcgaccttgttgccatggcgatttgggtgcagatcggcggagaggaacgagacgagcaggccaacggtaaacgaaggagttggaggaggggttaggggagcggggccagaggtaaacgtgcggacgttggcaattgctgccgcacgatggtgtgcgggccacatatgtggctgcccgatcgttcgggcgctggcggcgcagggggtgtgcgggctggcaagcattattgccgaacgaatcgtgtggcactaaaccttacagcccacacttgtggcagttatcggcgtcctaatcttaatctcagtattcatcttgacatggagtgagtcgccgcagagcgtcaagcttccaattttgtttatctgcatatataagtgatacagtaccaattagtatttcagccaagttcatccgggaaattaaacgaggtccagtcggaaacggaaatttcatcagatctccgcccgtgaccatagtttctacggaggatttccgcctttgctggcctttatcgttgtagccgtgtaggttacaattgattcagttcagatacacacatgatgcatcaacaatagacaggcagcgtcggtcatatcatatcgcactgcaggacacgaaaccaatgaatgagtatcccattctccatggtaggctaaactgctattgctacagaaattaactatgcttttatctttctccattgtcatgtcttatgtttgctcaataaccgacaagggtaatctttgtgctgtgcctccttcgttccacgcgcgtcgatttcagaccccagctcaagaagaaacagaaataaagaaagaaaacagagaaatggagtggagcttctctgcaatgcctccttgcttgatcgcttcatctccgagtgcctgagcactgagcagtgacacgacttcttgggtggaggctaacagaggaaaggccatggaagccatggaaaggccataggctccctgcttgggaagctcggcgatttgctcgccggcgagtacaagctgctgaaagaagcaaagggcgagatcatgttccttaaagccgagctcgagagcatgcgtgtgttcctggagaagatgtcggaggcggaggaggaggaggctgacaaacaagcaaagtgctgggctgaggaggtccgcgatctgtcttacgacatcgaggacaacatcgaagatttcatgctccgagtggaatgtgagtcaaacagcaagccacatggcttcaaggggttcattgaaaggagcatgaacttgctgacgacagtcaacactcggcataagatcggcaaggagttgcaaggtctcaagagacgtgtcatggaggtgagcgagaggcgcatgaggtacaaaattgacagcaccgtctcaaagccaaacagcacagccatagacatacgcctgttggcgctctatgcgggcacggcgggcctcgtgggcatcaatgaaccgagggacgaattgattaaggtgatgctggaccaagacggcgtttgtgctcagcagctgaaggtgctttctgttgtgggatttggaggccttggtaagaccacacttgcaaatgagatctatcgcaaactagagggccagttccagtgccgagcttttgtttccgtgtcccataaacctaacataaggaagatgtttagaaatatactatctcaagctggctatgtagcccctgatcaaactaatatggaaacatgggatgaggatcagttgatcagtacacttcgaagattccttgcagacaagaggtactccaatttgcaaatgactttattccaaagtaatctatagtgcttggtttattttgttggaagatattcttttagcttgcttgctgtatgctgtcgtagaaacttacattcttagaccctctggatgggcgttttgttagtgaaactagttaagccatcaagttccgtgaaacctctataatcatgtaatttattccatatttgaattatttttcgttactagaaaagaaggaactagataaagactagtttgcaagtcagaaatcttacaattgattttcacattttctcaaagtaaaattcctcaaatgaacatcccaattcttacaaatgcctgcatacatattttttgtttttaaaaaagtgtcaatgcctgcgtaaggtttagttttaaagcatatatttacccatcgatacaaagaaaacaaggcaatgcgagctaccatctattcaattctaaaaccaaatgggcctactcttgaaaaaagtgtcaatgcctgcgtaaggatcaccaagcatatgcacttttgggaaactgaaagatagatgttttcttgggtggtgttttagccttttgaagttcacttgaagaaagtgaggatgcttattatactccatataatctgaatttcttgtcaggtactctattgtaatcgatgatatattggatgcaaccacgtggagtattgttagatgcgctcttccagaaaacaggaaaggcagcatagtaataacaactacacgaattgagactgtggctacagcatgctgctccaatcgccataactatgtttataagatgaaattacttagcaatgaagagtcaagaaagttgtttttcaaaagagtttttggttcagaggatggttgtcctaagtatttggaagaagtttcggctgaaattttaaaaagatgtggcggcttgccacttgcaattatcagtatatccagccgtttaaccagtcaaccaaagatgctgaagggccaatgggaggacatattgcattctttgggctccaacttggaagtgcatcccaccttggacggaatgagaaaaatactaaaccttagttacataatcttcctcattatttgaagacatgcatgctatatttgggtatatatccagaggatcatataatcaacaaaaatgatttggtcaggcaatggttagcccaaggttttataagtatatcacatgtgcgagatccagaggctgttgcagagggctatttcaatgaacttgtcaacaggagcattgttcaaccggtagatacagatcataatgatgaggtgttgtcttgcaaagtgcatgatatgatgcttgatcttattatacacaagtgcagagaagagaattttatcactgcagtagaagacttacaagccgtgattggactgcaaggcaatgtccgccgactctccctctacttggatgatgtaatagatggcgctacattgggaacatcccggctcttacaagtaagagcgctagcaagatttggtatctcaacatacacacctcctctatcagagttcaagcatctccgagttttaactcttgaatttccagataagcttatgaaacttgacctcagaggaatgtttcatttgttccagttgaggtatctaaaaattgtggcatataattgtggaaaaatagtgctaccaaggaaaattcggagactagagcaattacagacaattgaattaagagcacatgaatctagcatgcttcaagttccatcagatattgttagtttgcaccggttattgcacctggttcttcctattgggataagtttgccctcagggattgggagcatgaaatccctatgtacattgcaaggattcgatctggccatgaactcagtagacaacatcaaagacctcggaaaactgtccaatttaaaggatcttgaaatatctcttatgcactggcagtttttggatgagatggaggcaagaaaacttatgaatattctgatctcttccttaggaaagctttgcaacctcaaatacctgtatatggaatcttatctccctcgtgtatgctcggatgcattgagttcaccatccacttctccccgtcttcttcgcggactacatttacggggttgcatgttatcgagggttcccaagtggattcaggagctccataacctctatgaccttgcactaggggttaaggaggtgttggatgatgatgttggaatcattgcacagttgcactcccttatccacctgcatttgtacatctttggaactcctaaagagagggtcaccatctgcggaacaggattccttgctctcaagcatttcgaagtcacctgccgttggacatcatacctgacgtttgcggcaggagcaatgcccaagctccagaggctcgagatcggattcaatgcacgcgaatgggatcagtatggtgctgcttttgtcggcatcgagaacttgtcaggcctcaaggaagtctctgtacgtattgggggatatggtgccgacgaatcaagtgcaagagctgcgcagtccgtgttgagagatgccattggcatgcacccgagttgtcctagagctaacatcaagtgtgatgagaacatgaatttcacttttgatgactagaaaaaagaggaggttgtgaatactctagcacttgaaggccaaattctggtaagaaccacccaatgaggcggcaactaataaccctaacaccatcgctctctcgttgattttcaataatttccctgcaagttttattttgtgtcatgcctgaaatgtgaaactctttccacatttctacatgaatcaaagattttcatgtgaagttcatgcaaaaaaatatatttaaacatgctcttaatcctagtgtgtttgattgttgtcaacaggatttctatgtcaagctggactgaccaagttgctatcctgcagcggcgtcttggcaccccactcgcttcatgccatcatgtgtaactgaaactcttcgctaagaaatgtggaagacgtgggcctctgtatacgcaggtacatctacgtgcttcgtcgtcacaagaatgtgctgccaccatttaccatatttctgttaagaacctattttctaagacctgttgtacgcactgttaaacttattctgcttgcttggtgtgagcttgagttgtgtgcttgtgtataatcgaatgatgaattggtgaaaaagtgatatgcttctgaaatttcgaagtgttcagctgttatatgtaaatcagggtgtgtgttcatgggaaagcttatccatgtattgatcacgatcggcttcttccaccgatcagatgtgcagatttcacaatgtttccattttagcctttgcaacatctgaagggaaactgcaggcggttggtaccagaaagaaacggtttcagattttatcctgttcttgctggtgaatgagcttctgtttaggctgatgtgtgctgttattacttgatgtgtcccttgcctgatgcactgatgctacagccttatgtggtgctggttagtttttgctggtcaccgtctcaccaccggcctcgccgacaaacgcccatcaccggcgccagtggtcactggtaggcggcgacagcgccatcttgaatcctacaagacaaaggatgtttgattacacatcatgaaaacacaaggatctccctaggtggttacagtcaatggaaaaggaatcctgtaaaataaagtgcaaactaatccttcagaaaaatttgcatacacattgcactcgtagaaatcaacaacaacccacaagattttatttacggtccttcaaaattcatctgaaccaatgaggccctttttttagattaatgccgcctttttgtacgggaaaaattattgtgcaccaggaagatgcatacaatcctacttagtctgtacagaatctatcaacaggtgtggaagaaagaggacaccttcctggttggactttttccagtccaccaatgagtggccaaaacccaaaagcctgatgtctgctccacttgggagcctgtctactcacacactacacagaggccaccagatgatgttgccggtccactgtctgcaagtgctgcagtcttttctcctgcaccacaaagcaatggatggattcacaaatcccctccttttccatattagcaaacacctgtaagtatgtgcctggttacagtttaatctaatcatcattgcccaccatatgcatgatatgggcatctcaccaccaccacaagagaacactaggattatcgcattcggtttcagccattttagctaatgcgggggaataatattatgtgtcgaaccgagagtgagcgtcgtactgtcatggaaaaggtttattaggagtggctatttagttggtgcttgacacttgtgggtgcaattgcaaagctttcccctgtccaccaatattatgtgctgccttttcttttctgaatttaaaagagtgccaacttcagcactaatcagtggtgcagcagcatactggaaccttccagactaactaagtggagtattctgtttgatgaaacttatgttcactaaatatgttaagaggtccattcttttaggaaatccattctgtcttgtagcaagtccatgcgctgtactgtacacaatctctgaaatcataccatattatcctatttgtgaacatatactatacgagtattgtatttttttttcaaccccaaaaacatatattaaagttctttgggaattaaactataaatttagccatatattttcctcttaacatatattatgttttaggtaaaggacaacatgaagtggccatgaagatctgcaacatcctctatcttaacatacatatttgcctcttagccagacaacaagtggattccaccacctccatcccaacaacatgctttatgcctgcacagacagttgacatgttctgagccgttgcttcaacacagtgctccccataggattattaagcaaagctaattaagcaaaagacagcaccatcatagatcacaaatcccttaaggaagaaccacacagatagacatcaggaaattcagaagataacatttccatgaacacctcaggtctacttggcaatagtgctgtggctgacccataataatcatgctgttttgtttagcatatcctccatgcgccctgccattccgacgctaactttgcgggtgcatgaatggttatcagaatatcagaaaggttgctggaatttgtctagtgggaaataaagttgatgtacttgatatataaaaccttggaccagcgagagctgaagattgattagttaatcagaaattagtagatgcagctaccttatggccaaatggtaataagtgatatggccaccttgctctgatcagttggtcagctgcaaagcatgccactttctttcagagtggccatgaagcatgcctttcggtcctctgatccgagaaaaagtaactagtgttagtacatctgattagctatctgatcatagattttgtggctggtaaagatggcacttggagtgtagctgaagggactggtagctcctagtaaattgtttttgatcatgtaatttgaattagtatgtaaaacgtttttctcttacttgatcatgcatcgtatgcaggccatctttaagatgatacattctgtttattttttctgcagtttttccgggttgaccatttctgtcttaatcatgagaacgagtacatttaggtcagtcatacatcacaagtaattaagcatgggaaaaatcaatttgaaaatgcaaaacaaataccaacagccctatcccagttcttctagctagcaccaactcctttgtataacattttggttgatatgaattatgaaatctacttggttgcttcatcaagagaccttgcatacctgaatttctgagagtgacaggtcaatccttgaggtttggacttctggccattcctcatatcattgttcaacttgtcaattgtttttccttcagaaagtaaacttgccaaaaaaaataaatcatttttcttccaacagactgcaagtgggtgatgtgctaatctgcaccgatctatgtccacatctacatgcatcatccttaattaatcttttgtgacttgtgaggttcaccttacctacccagttcagttcatctcatattttttacagtggtgtccaagtccagggcggacctcagttagtaaaactggtaattacctcgttggatccattaaacctgtatgatccagaggtcagccatgcagtgtcctacagagtacagacctaggctaattttcatctgaagtagaggaatgcttggcttatatctgaagcctgagggcaaggcatagattgcagagtaagaaaacttgtgattacatctgatctgactttcttgcagatcggtgcatgcacagaaagaggaagcttctgatgttagttaactcttaatgatctgagcaagtcatcggcgccggccggctgttttctcaaggaaaacaatagaatagaaggtacgcttgcttaggaaggcgtgaccaaggcgtagacctgaacttttgtcgccggtcgaattttctaccgcccttgctgttttctgaatttttacttgcgtgcattttccaccaaggcgcgcgtagacctgcatctcgctgttttctgaatttttgatgcaaattcattttctcaataattctcacagggaattcagctggttcagagctcattctgaccagtgacaacagtgctgtggttactgccgatcactcagcagagtagtaatcacatcacacgcttggagtagagtagaaaacttgtgctgagaaacattacggctgatctgacttttgtgcaggtaggaaacactacagaaagaggaggaagctgccgatcttaattaattcccaagtaatctgaacaagtcactgccgccgccggctgttctctgaagaaaaacaagataaaattatacacttgcttaggcagcaggcatgaatggccaaggcgtagacctgaattttcgtcgccgacacaccattttctactgccacttgtaaatattttttcctcctatatagatagatagacagataaatgtagatagattagataggcctgcgacttgggttgcgtactcaagtcattctgaagctggctcttgatgtcagtcagtaattctcatgaaatattcacccgtgttcaaagctcattctgacttgtgacagcggtgtgattagcactgatcacttgggtaaatcctgtttgattatttgcctgtgtaatctcatgattggagctggggggcgccacgtgtcagcctcccccggccgttgacctcactcctgtcctgcctgccccccacctgacctgacctgaccgccattaaagtactcaatcaagctcctcatccactgtgatcagaaaggagctatgaaaatgacacaacagaaaatgataccccgcgatctagtctaaacacactggctggctagtagttagtgtaggtgtatatatacatatatatacacatgaatccacctacatgcaggaattccatttaatcagaggaagacgacgaagaagaggaggaggaggaggaagaggaagtgaggttggttagccaagagtcaaacccggctgctgagtctgacagacaagctcggatagttagctacagctgatcagcaacctccattcttggtccacaaagaggtttgcttcgatcgatccactgatgtgggttcttgaatgagcgatcgttaattagctggaaatggcggggcgaggcagcggtggtgcactggcggcggtgatcgtgctgctgtcgtggtgctggagtggcgcggcgcagccctcgctgcggtgcggcgacggtgaccttgccgcgctcacagggttctcggccggtcttgatgctccggtggatggatggccggccgtcgctgatgacgatgaggacggctgctgcgcgtggcccggcgtggtctgcggcggcgagcgcgtcgtcggggtggtgctgccgaaccggacgctccggggggaggtggccgcgtcgctcgccgggctgacggcgctccgcgtgctcaacctctccggcaacgcgctgcggggcgcgctcccgcccgggctcctccggctgcgccgcctcgaggtgctcgacgtcagctccaacgcgctggccggcgcgatcgggctcgagctccagctcccggcggcgcgggtgttcaacgtgtcgtacaacgcgttcaacggcagccacccggtgctccccggcgccgtgaacctcacggcgtacgacgcgtccggcaacggcttcgaggggcccctggacgccgccgcggtctgcgcgtcctcgccggggctgcgggtcctgcggctgtccatgaacaggctctccggcgacttccctgtcgggttcggccaatgccggtcgcttctcgagctctcgctcgacggcaacggcatcaccggcgccctcccagatgacctctttgccgcgacgtcgctgcggtacctcaccctccacaccaactccatctccggcgagatcccgtcggggctccgcaacctcaccggcctcgtccgcctcgacctctccttcaacgcattctccggtgcgctgcccgaggctttcgacgcgctcgccggcacgctcgaggagctctcggcgccgagcaacctgctcaccggcggccttcccgccacgctctcgcggtgcgtgaaccttcgggtactcaacctccgcaacaacacgctcaccggcgccatcggcctcgacttccgcgccgtcaatagcctcgtctacctcgacctgggcgtcaacaagttcacgggcctcatcccggcgagcctccccgcgtgcgccggcatgacggcgctcaacctcggccgaaacctcctcaccggcgagataccgccgtcgttcgccgcgtttccgtcgctctccttcctgtccctcaccggcaacggattctccaacgtcacgtcggcgttgaggatactgcagcgcttgcccaacctgacgagcctcgtgctcaccaagaacttccgcggcggcgaggcgatgccagaggacggcatcgatgggttcgccaagatggaggtgctcgtcattgccaactgcgagctcaccggcgggatcccggcgtggctcgctgggctccggaggctcaaggtgctcgacatctcgtggaaccggctcgccggcccgatcccgccgctgctcggcgagctcgaccgcctcttctacctcgacatatcgaacaactcgctgcagggggagatcccggccagcctgacgcggatgccggcgctgctggccggcagcggcaatggccgcggcgacgacgacgagaaggtgcaggacttcccgttctttatgcgccggaacgtgtcggcgaaaggacggcagtataaccaggtgagcagcttcccggcgtcgctcgtgctggcgcggaacaacctcaccggcggcgtgccggcgggtctgggagcgctggccagattgcacatcgtcgacctgagctggaacggcttctcggggcccatcccgccggagctgtcggggatgacgagcctcgagtccctcgacgtgtcgcacaacgcgctctccggcgccatcccggcgtctctgacgcggctcagcttcctctcccacttcgccgtcgcgtacaacaacctctccggcgagatccccatcggcggccagttcttcaccttctcgagcgcggacttcgccggtaacccgttcctgtgcggtttccacgtgggacggaagtgcgagcggaagatagatgatcaggccacggacggcagcacgaccgggagcaatgacggccgaaggagcgccggcgtcgtggcggcgatatgcgtcggcacaacgctgctggtcgccgtgggccttgccgcgacgtggcgggcgtggtcgaggcggcggcaggaggacaacgcctgcagggtggccgccggtgacgacgaggaaagcaccgactcgtccgcggcgaggtcgtcgacgctggtgctcctcttccccggcgacgacgaagaggaggagacgacggtgatcacgcttgaccaggtggttaaggcgacgggggacttcgacgagacccgcatcgtcgggtgcggcgggttcggcatggtgtaccgcgcgacgctggcggaagggcgcgacgtcgccgtgaagcgcctctccggcgacttccaccagatggagcgcgagttccgggcggaggtggaggcgctctcccgcgtgcgccaccgcaacctcgtcgccctccgcggctactgccgcctcggcaaggacgtccgcctcctcatctacccgtacatggagaacggcagcctggaccactggctccacgagcgcgcggacgccggcgacgccctgccatggccggcgcggctgcggatcgccctgggcgcggcgcgcgggctggcgcacctgcacggcggcggcgcgcgggtgatgcaccgggacgtgaagtcgagcaacatcctgctggacgcggcgatggaggcgcggctgggtgacttcgggctggcgcggctcgcgcgcgggagcgacgacacgcatgtgacgacggacctggtgggcacgctggggtacatcccgccggagtacgggcactcgccggcggcgacgtaccggggcgacgtgtacagcatgggggtggtgctggtggagctggtgacggggcggcggcccgtggacatggcggcgcggctgggcgcgcgggacgtgacggcgtgggcggtgcggctccggcgggaggggcggggccgcgaggccgtggacgccgccgtaccggcgcggcaccgggaggaggcggcgagggtgctggagctggcgtgcgcatgcgtcagcgaggaccccaaggcgaggcccacggcgcagcagctcgtcgagcggctcgacgccatcgccggcgccggcgccgccccggagattcgctccggcacggtagataactgaagcttgtgtagataactgaatcgatactagagtagctagctgtgacagtaatatctcgtgtaaattttgacaagagttgattcgtgtataaagattgaatggatgatgattaacgcagcgggattgctatatctatattcttgatttcacattttacacgaagatccgtgtaaaattttctttgattttttaatatgttttattagttgaccaagatttagttaaatctcagtcgacgaagacctagccacacccttaattcagaggcgtaattccacgtacgatgtttcctagacgatatgcgcacgacactcaaatcgaacagtgtagcagtgctggccagttgcatccaatggtacctgtagcatgtcgtccgtaaatcggccgcaggctgtcgttcacgtagcagcgctcattcagagtttcaactctgcaccgcatccaaaaagttaatttaaatacgaaaactcaaaacagtgcccgggctcatctgctccctctcagcaaaaaattcaaaaaaaatactaaaaaaattcaaaaaattccaaatttttttgtagtggtagataaatttacgcgtgaggtgcgcaccaaaattcaacttatttggacatctgagcagctctcggcaaaaaagacaaatcgggtcaaaacagtgcatgaacagtaaacatttttacagaccctgattttgtcttttttgccgagagctgctcagatgctcaaatgagttgaattttggtgtgcacctcacgcgtcaaattatctaccaccacaaaaatatttggaattttttgaatttttctagtttttttttttgaatttttttctaagcggaggtgtagatgagcccgggtgcatattagccgcactcatttaaataagaacacacaatacattcctcacaaaaaacaaaccaacaagcaacactttttcccgccaaaaacaaaccaacatgcatttcaaccccgcaccgattccaaagggataatttgaagttttgatgtccttagaaacataattgacagactgatctcttaaaataggctttcgtctcgctttataaataaagcaacaactaaagaactagccacggcacctggaatggctgatcttgccataatggacatgctggacgctgcccaccggcgtctcatggaagccctttgcgatcgaaacgaaggataagctaaactggtttatgggaaaaggaccaatagtcatttttcgaaatacttgtttttccggtttttgggaaaccaagtttttttatccatggattagttagactaaccaaacatggttttgggtggttagatgcctaaacatgattaacggaaactggtttggtataaccatcgtatcgaaacaacgccttagtgttaaaaggtgcctccatgtaatttcaaagttgcctacctatgatgctcagttgcttatatatgacaaaagttgtgtgccatcatttctaagttttctacaatatacttgctaggtgaattcactagtacacatgattcaagaaagttgcttatgtttggcattaaagttgcctcatctagcattgaagttgattttgaaaaaaatcactaaaacatatccatatgagatctagtttgaagagctcattgtgaaaaaactaaggataaaaacagatcttcggtggtccactatagagctcgtatgtagtcgtttctttctcgcctaactaatttttttatgaggcgatacagctgagatcagccaacagttcgagcacttagcacaatgtgccacttaaccgcttcttcaaccccaggatgtgatgagttataactttaaaaaattggaacgaaataaaatggaatgacgtcagcacatgcttctattcctccaaaatagaagaagattcccagtaattctaaatatactaaacctagctaggattcttttttacagtttttttgactttttcttgcagtgaaaactcagccaatgggaagccgacacgttaattagcggggaaattgctgggtacgccttgggtgcacttagcgatttgtgtcgatagcgattagtggattggttttctcttctcctcccgattacctccgcgtgtcgatgcttctctcgaaggcccgggtgggctctcggcctccaccgcccaccgctcaaccctcgattcaccgattcaccgccatacctccctataaattgctcccgtctctcaagctcgcttcagcgcccatacccatcacgcagcgcccacacgcaccagcagggagcggcggcgacggccatgggaggcctcagccagcaggtccggacgaggtggtgctggcagtcggcgaggtcccctcggcgcgcagtgataacccacaagtataggggatcgcaacagttttcgagggtagagtattcaacccaaatttattgattcgacacaaggggagccaaagaatattctcaagtattagcagttgagttgtcaattcaaccacacctggataacttaatatctgcagcaaagtatttagtagcaaagtaatatgatagtagtggtaacggtaacaaagagtaaaggtagcaaaagtaatatttttggtgttttgtagtgattgtaacagtagcaacggaaaagtaaataagcgaagaacaatatgtgtaaagctcgtaggcattggatcggtgatggagaattatgccggatgcggttcatcatgtaacagtcataacatagggtgacacagaactagctccaattaatcaatgtaatgtaggcatgtattccgaatatagccatacgtgcttatggaaaagaacttgcatgacatcttttgtcctaccctcccgtggcagcggggtcctaatggaaactaagggatattaaggcctccttttaaaagagtaccggaacaaagcattagcacatagtgaatacatgaactcctcaaactatggtcatcactaggagtggtcccgattattgtcacttcggggttgccggatcataacacatagtaggtgactatagacttgcaagatagaatcaagaacacacatatattcatgaaaacataataggttcagatctgaaatcatggcactcgggccctagtgacaagcattaagcatagcaaagtcatagcaacatcaatctcagaacatagtggatactagggatcaaaccctaacaaaactaactcgattacatgatagatctcatccaacccatcaccgtccagcaagcctacgatggaattactcacgcacggcggtgagtatcatgaagttggtgatggaggatggttgatgatgacgacggcgacgagtccccctctccggagccccgaacggactccagatcagccctcccgagaggttttagggcttggcggcggctccgtatcgtaaaatgcgatgatttcttctctctggttttctttctccccgaaagcaaatatatagagttggagttgaggtcggaggagctccagggggcccacgaggtagggggcgcgcactaaggggttaggcgcgccctccaccctcgtggacagggtgtgggccccctggtcttcatcttttgcaaggattttttattatttccaaatagaccttccgtggagtttcaggtcattctgagaaattttgtttctgcacataaataacaccatggaaagactactgaaaacagcgtcagtccgggttagttccattcaaatcatgcaagttagagtacaatacaagggcaaaagtgtttggaaaagtagatacaacggagacgtatcaactcccccaagcttaaacatttgcttgtcctcaagcaattcagttgataaactgaaagtgataaagaaaaacttttacaaactctgtttgctcttgttgttgtaaatatgtaaagccaacattcaagttttcagcaatgattatgactaaccacattcacaataactcttgggtctcatgtttactcatatcaatggcataatcaactagcgagcgataataaatatcgaataacaacacttcctcaaaacaatcatgatatgatataataagatggtatctcgctagccctttctgagaccgcaaaacataaatgcagagcacctttaaagatcaaggactgactagacattgtaattcatggtaaaagagatccaattatagtcatacccaatataaattaatagtaatggatgcaaatgacagatgtgctctccagctagtgcttttaataagagggtgatgactcaacataaaagtaaatagataggcccttcgcagagggaagcagggatttgtagaggtgccagagctcgattttgaaatagagataaataatattttgagcggcatactttcattgtcaatggcgatatcttccatgctacacacattataggcggttcccaacagaatggtaaagtttatactccccctccaccaacaagcatcaatccatgacttgctcgaaacaatgagtgtctccaactagcaacagtcccagggggagttttgtttgcaattattttgatttagtttgcataaagcatgggctgggcatcccggtgaccagccattttctcgtgaatgaagagcggagtccactcctcttgagaataacccgcctagcatggaagatacggacagccctagttgatatatgagctattcgagcatacaaaacagaatatttatttgaaggtttagagtttggcacatacaaatttacttgaaacggcaggtaaataccgcatataggaaggtatagtggactcatatggaataactttggggtttaagggattggatgcacaagcagtattcccgcttagtacaagtgaaggctagcaaaagactgggaagcgaccaactagagagcgacaacagtcatgaacatgcattaaaattaataaacattggatgcaagcatgagtaggatataatccaccatgaacataaatatcgtgaaggctatgttgattttgtttcaactacatgtgtgaacatgtgccaagtcaagtcacttaaatcattcaaaggaggataccaccccactataccacatcacaaccattttaatagcatgttggcacgcaaggtaaaccattataactcatagctaatcaagcatggcacgagcaactatgatctctaattttcataaaaaacatgtttattcataataagctgaatcaggaacgatgaactcgtcatatttacaaaaacaagagaggtcgagttcataccagcttttctcatctcagtcagtccatcatattgttggggaacgttgcagaaaattaaaaaatttcctacggtttcaccaagatccatctatgagttcatctaagcaacgagtcatgggagagagattgcatctacataccacttgtagatcgtgtgcggaagcgttcactagaacgtggatgatggagtcgtactcgccgtgatccaaatcaccgatgaccgagtgccgaacggacggcacctccgcgttcaacacacgtacggagcggttgacgtctcctccttcttgatccagcaagggggaaggagaggttgaagaagatggctccagcagcagcacgacggcgtggtggtggtggagcagcagtactccggcagggcttcgccaagctcgtgacggaggaggaagaggtgtagcagggggagggaggcgccagaacttcagggtgcggctgccccctcccccctccctttatattggaccccgggggggcgccggcccctggagatctgatctcccagggggggcggcggccaggggggtgaagtgccccccaaggcaagtggggcgcccccccccccccccccctcgggtttcaaccctaggcgcagggggtgggccaaggggggcgcaccagcccgctatgggatggttccccttgccccctccccctccctttatataggcccccagggggggccggcccttggagatccaatctcccaaggggggcggcggccaaggggggtggagtgccccccaaggcaagtgggcccccccccccaccctagggtttcaaccctaggcgcagggggtgggccaaggggggcgcaccagcccactatgggctggttcccctccccacttcagcccatggggccctccgggatgggtggccccacccggtggacccccgggacccttccggtggtcccggtacaataccgggtgaccccgaaactttcccgatggccgaaacaacacttcctatatataattctttacctccggaccattccagaactcctcgtgacgtctgggatctcatccgggactccgaacaacattcggtttactgcatactcatattcatacaaccctagcgtcaccgaaccttaagtgtgtagaccctacgggttcgggagacacgtagacatgaccaagacggctctcgggcaataaccaacagcgggatctggatacccatgttggctcccacatgctcctcgatgatctcatcggatgaaccacgatgtcgaggattcaaacaaccccgtatacaattccctttgtcaatcggtatgttacttgcccgagattcgatcgtcggtatcccaatacctcgttcaatctcgttaccggcaagtcactttactcgtaccgtaatgcatgatcccgtgaccagacacttgttcactttgagctcattatgatgatgcactaccgagtgggcccaatgatacctctccgtaacacggagtgacaaatcccagtctcgctccgtgtcaacccaacagacactttcggagatacctgtagtgtacctttatagtcacccagttacgttgtgacgtttggtacacccaaagcactcctatggtatccgggagttacacgatctcatggtctaaggaagagatacttgacattggaaaagctctagcgaaacgaactacacgatcttgtgctatgcttaggattgggtcttgtccatcacatcattctcctaatgatgtaatcccgttatcattgacatcgaatgtccatagtcaggaaaccatgactatctattgatcaacgagctagtagactagaggctcactagggacatatcgtggtctatgtattcacacgtgtattacaatttccggataatacaattatagcatgaataaaagacaattatcatgaacaaggaaatataataataatccttttattattgcctctagggcatatttccaacacctgactgggccctcgaccgcggactcgaagaagatccggacatatttgtggagatcatcgacatgacgttctatcagttaagctgtgacggtgccttggtggccatcatagctgattatcctggactgctccctgcatcgcatgtaagtaaaaccggagtcccaacttccgagcaggatcacttttttgcacttcacccaccgcacacatatggtgtcttattgggaaggccctcgggacgccatgccgaacccgcagtgactcaccaacaaggggcaccgaaaccgggtaggcttaaaaggaaggtggtcaggactgagacgccgtcgcagaggtacgaaaaagaaccctgctcagtggttgtcattttttaaatataatagcatccatggttcctggcaagaaaaatgctcgccggaccgtatccagagagcctgccggccacgcctccaccagccgggctccagagccgcactcagaggcagatgctaacgtggggacaacaccgaatgttcctcctatagaggatgtggataggctgtctgctacaaattccgaagtggagagtgccatgaatcacaggcgtcgccgggctgtactccgtgacccgggtttttctgaagaggtgttcgatgccttcaactcaggggacacgtacatccgagctgctcaaaatggtcttgccagagccacggaccagtatataaaggatatacgggtaagaaaatctgataattatgtatatcagtagcccctgagacttgaaacagttggcacaactgatttaaggatcattatttgcttaggttcttacggagaagaagacccagttgtctcaagagctggaggagtgcaaagaccagctacaggccgcagttgccgcaatgaaggagtccaagaaggccccatctagtaacacttcttcctattgaaaagaatgacatataccagttagtattcggcatgcatgcaaatctaacaatagattctgcagatgaccccggagtgaatccggaggtcgtgcgaggggatgagcaacatgctcaccgacagctagaggctagcgagcgcgtgcttacgcaggttaggtgggagaaaaagatctccaagatgccaatacccggctgggtgttgaactgaaagatgttcgggtccagcttgctgactccgtaaaggagaataagaggcttcgacgcggcatttttagtaagtgcttgaacgaacttttatagagttcggtgaagaaaccggctaatagagttatatctgtaggtatgctgacgagtcgtcccgcagaggagatgcccgggtctgcgggtgatcttctgccagagctctcacaactgcacgaacaagttcgataggtgatgcagggcattgcccaggccttgtggccatccgcctccctgccaggaggcatgggggagctcgtagagatgttcaagggagcgcggcggcgcttccgattatggaagatatctgcctgccgacaaggtgcaagggaagcctgggccatggtgaagactcgatataccaaggctgacccgaaccacatggccgaggtcggacctgtggggtctaatgggaaagagatccccgtcagtttggtgtatgaccaggtgaaattagccgcaaagtattcccaacaagattgtaggctagacagcttgttggatggtatagaagaaaaatttagtcagtctaagttactgtgtacttcaagtgacatatattgtccctagccagattgtaaatcatttgtcatggcggaccttttcgcttcgacctccggacccaacagtccgtagtgtatccgaatacccgcttagttatgtaaaaaccggggtacacgtggaaaccaggcgtaggggtcataagtgcttgaacagacaagtacccaactatctatgttatattacatggatagtaagaaacatcttccagggagaatagtttcgttaagggttcctttccctgggtacgcatgcattaatgtgcatgtccgaactgtgaaaagagacgcaggatataaacatctgggggcatgtattccactaagtaaaattcatcttttgttcaccggccgaatattcccttaagaacgctagctttcggcttcaccagtctgaggtacacatccggctgacccggcagtaacaatcgcagaggtgctctacttaggccctagccgaattaacgggaacgtagggcataaacacaagagccaggaaacccagcttggccaaaacttaagtcatatcgatgcatataatggcaaagaaaaggtacatgtggaaaagtaacgcatgtgcagggggcatagagcccggaacatagttatattaagcttctgtataagaatccccaggtataatgagcacgcctggcgcgtcaagattgtgtagtcaagacaaattttaaccttttaaggccgtgaagaaaaagggaagaaggaaagaaagacagatagcggatatatataaaaaaattgacggaggtaaggagatgaacacagagtccggcactaggcgtagaacctttggagtatggccgcgttccatgggtttggctcgagtcaattgtccgatgcatcccgcagatggtacgctccaccggttagaactttgtcaataacgaagggaccttcccatttgggcttgagcttgtcctttttcttctctggtaggcgtagaacgagttcgccaacgttataagttttggcccgtacttctctgctttgataccgtcgagcctgttgctgatagaatgcggagcgggcttttgccacgtcgtgctcctcctccagggcgtccaaactgtcctgccgatcaagctcggcttctttctcttcgtacatgcgcactcgcggtgagtcatgaatgatgtcgcagggcagtaccgcctctgcgccgtacaccataaaaatggtgtgtatccggtagtgcgattcggcgtggtccgcagcccccatagtacggagtcgagctcctcgacccagtgtgtatctgattccttcaaagatcacactaatctgggtttaatgccgctcataataagaccatttgctcgctcgacatgaccgtttatttgggggtgatagacggaggcgaacgggcccctgatagagggtcgtgagaattcgccgtgatatatagcttgatgccagataggtccagatggtacttattgttgtccgaagacacgctttcccatagttcgatcaagccgaacacttgaattttctgcattgaataggcaatgcagtagcccccgagacactggtcgggtggcaacaccagatcaggggatcgatgtgcccctttaatatttgtaaataatgagcgcaaagcccaatagcccccgagccttaatgtcggcacgggtggccgaattaaggatcgatatccagagtaaaatcacagattatgtgtagtgattctatgtatccaagtactttacatcattattttgactccattgttaccgtttatcagtggaaagtggcctaccgtcggcttctaccccttgtagatactacgtagggtgtttccgcaagaacaaagcaacgcttagccgacgtctcggtgcccgaaggcggttgtgttagcagaaacgaggcaatcagatatgcgggctttaaaactttcgcttagtcataggagctttatactggggaagctagctatgagccccggttagtgttcggcgatagccgaggtcaagccataaacacttaggccaatgttatgaacggcccatcatttaacatagtcatcggatcgctgaccagtttacggctattgtgacagtcagttttcggctttctccactgaggtgcttgaccatgcgaactggaagcacaatcgcagtggttctccttttgcacacctagccgaacaacgcggaacgtaggaggtaagcacaggagccgggcaacccaactattgaccgaagacacaattcgaaaccgatgcatataaagcaatatccgagaatgtttttgccgaatcccaaaaggtgtccggcgttgcactgcgagactaatgctggaaacgcacaaatagtttaaaagtgccataggcttgaaaaaccaaaaacttcagtaaaagttggacgtccgaactaaatcgagtgttcggtgccaaatcaaaaattggacttagaaaattgtgtttcctgcagtgctttaacatgacacatcctatctcaagacttcaagcgggtcaatctatggcttcaatctccttatcccgaaggcggagtgcttctccgaggctagtttagcaaactacactcgagcgaatttagagagaagcaaggctatccggctattgaccacacacttgcatcgagaaagaagtgatagaaaaaaacactttgcaacgaccaagaagaaaaatagatcatactaatttaagagcccccgcgtgacttgggtaaaagaatgattgtgtgtaccgaagtacttatatcatatctatgttcacccgaactttaaacgcgtcttaaccgaccatcggcttgtccctcttcggttaaaagaccgaaaagtgttaagtactccacctgtcgagaatatcgacggtgtttccgataaccaggcaatcaggccatatggatgtaacagacaatgtgcgctcagggaacttatgctatattatgaacaaagtgtaagaagcatcttcgaagaaaatagtacccccaccgatacctttcttcagttgctcattgctactatgagacttatgcaatagattttttgtaatcatgagttctgttgtgtgccgaccataattgaaaacagtaagagcgctagctttcggcttcacccagtctgaggtctggctcgggtgacccgatcgtgacaatcgcagaggtgctccctttactccctagccgaacaatcgggaacgtaggggtaaacacaggagcaaggcaacccagcttgcaaatcccttaggtcaatatggtgcatattgtggcataatacacgaaataggaacgaagccgtacaagtataatcatatgcaagaggaaaagctccatcaagggagcacccaagtgatcggggaattttaatttgttcgtcacaaacaaagtttggacaaggaaattttttacaagcaactattttccaaaaaagtataatgcttgatcgaaccgaacacaagttaaaaattaaaaactttgagcaggaaggcaacttaactggttaatatgttcggtattgatgacgcggtccgagcttgatgtgggacaaggttttatcccccaagccggtcccgaggtgacgccaaaggatatagtccggctggatcattttcctgtgcacaaaaaatagttcaaaccggagataatagtaataatgataaattaaaaaataaaaattgatgcataataaataatttatgcaaagtgagtaataaaagaaatatggcctggcgccaaagtcactgtcgatgcagggcgacggcgtgacgcggtgaaggtgtggcaaagcatgaattcacaggtcggtccgagtttcggatgcggtgttcgccggactatgtacgaaaactgaccgaaccaccatgcgatcatcgttaatgcaaccaccatttgacagacctgtgtacatatgatggacaaaccggagtagtaattcctttggaaaaatgaacccaaacaagcaaaaaatactaggattaatagcacctggtttatttgttgtagcaatccgaagaaaggtgattcccaaaattgggactcaatccgctcacccagtgcctgatgggcgataaagcgacggcacggcgatgctggcaaaggttggctcgccgaggccaagccctcggtccagctaacatgatggagctggtcggctagtgacgccaaagtctccggggtaggttgatgaagagatggtgaagcccccggtctagccgagatgtcgaagcctcgatgtcagctgatgagtcgaagtaggtcggcgtgatggacatcggattgaagaagcaacagtgcggccccgctgaggcaggtcgcgacgtggtcaatgccgtacatagttcggccgggagtctcctaacagggagagagatttgaacaaacttagcacatcgcccaagggtgagtgttgaaaggtatccgcggaggtgaactccataatcggtgcccaatcagattcgataggcacaggcgcaggcggctcggagtccgtggccggggacgaatccagtagttcggcaacatggctctcgtaagaggtgaagtcagtatccggctctatcgccactgagagtgcggcctccatggcggggtctatccacctatcctcaaagggcgcgattcgctccggattgagggccagagtagttgcaggtgtgatctcccgaacactgtccgacggcagagctaaatcatgctcgtcgtgaccgtgcggcgcacctggcatgggttctgttggggatataactatttgtgtaagccgcccaggaggggccgggttacacaaagaagactcgccagattgaagcctgtaatcaaacatgaagatggcggttcaataaagggcttaaggcccacaggcgacttaaggcacgttgtagcaaaccgccacaatggcatgacttgtatcataaggtagatttaactagtcaccgagccggacactgtttctaagtcggtcgggactctgtaagccgcagggcgtcaacccgtgtatataaggggacgacctgctggcggcttaggggcaagaaacaactcatcgagagccgggcatagcatttcttgctccctggtcatcgaaacatcaagcaataccaacccaactagacgtaggctttccttcaccgcaaggggccgaactagtataaaacctctcgtgtcctttgtcccgattaacccctttaagcttcctagttgcgatggctccacgactaagtccttgcaataggacatctgccgtgacaattccacgacagttggcgcccacagtggggccagcgcacggtggatttgagttcttgaagggcagcttcgaagggctcaagggatatgcagtgggctggatgaccaagagtcgtcgcggcaagatctacatcgacaacgaaggctggggccccgacgccgactcaattgagtacgggtaccgggtcccctttggcggaatctacgtcttcatcggccggatcggtgagccgggccctgagccgaacaactgcaccgaccccgtcgagatggctcagcgtgcgagacccgcccgagctcaacctgtcgtgaagcgtgccttcgtgggctgcgtccacggagaagaacttcctgaaggatctaaagatggtggtgagacggctgtcccctcggatgatgattcgtccacgggttcaagagattctttatatcaagtccaagagggcatgcttgggggctgttctgacggctctagcactccggacttctatgagccgccaaactgggcaggagtcttcatggctggtactcaacctggtcaaaagtcaacagctgcaacagcaataacgtccgggttaggagcagccggggcaggaggacctgtgcgcccgccggctcaggtgttgatggatcttatggataagctgacggccctgttaaccgccatggttattcctgcaaatcaagatgagcataacgcggaggtggcgagggtgcatgaggagatagcccgggccaaggaggccttggcagctgaggacaccaggttagctacaaagcgggcggctttggacgcacgggtgcagtaactccagtcagaggctttctagcttaatatgagccggaacgcatccaatgaggtgatgaggaggagacatcagaaaactcagtcccggttgcctccgatttatgaccctcggaaccttttcgctacgcccggtgccggccctagcaacccgcctggagcaaatcagttcacaccagccggcgcgggggggccggctcagcttcaagagatggcacctccgcatgggagtacgtccccgccccgttatgtactaataccatcgggtcacttctccaaccccatggagaacttgatagcagcatcggcgcgtttggcggctctcccagtggacggtgatgatccgactgttggaaatatgccctagaggcaataataaattagttattattatatttccttcttcatgataattgtttattatccatgctataattgtattgataggaaactcagatacatgtgtgggtatatagacaacaccatgtccctagtaagcctctagttgactagctcgttgatcaatagatacagtttcctgaccatggacattggatgtccttgataatgggatcacatcattagcagaatgatgtgatggacaagacccaatcctaagcccagcacaaagatcgtgtggttcgtatgctaaagcttttctaatgtcaagtatcttttccttagaccatgagattgtgcaactcccggataccgtaggaatgctttgggtgtaccaaacgtcacaacataactaggtggctataaaggtgcactacaggtatctccgaaagtgtctgttgggttggcacgaaccgagactgggttttttcactccgtgtaaatggagaggtatctctgggcccactcggtaggagatcatcataatgtgcacaatgtgaccaaggggttgatcacgggatgatgtgttacggaacgagtaaagagacttgccggtaacgagattgaacaaggtatcggtataccgatgatcgaatctctatctcgggcaagtacaataccgttagacaaagggaattgtatatgggatcgattaagtccttgacatcgtggttcatccgatgagatcatcgtggaacttgtgggagccaacatgggtatccagatcctgctgttggttattgaccggagaacatctcggtcatgtctgcatggttcccgaacccgtagggtctacacacttaaggttcgatgacgccagggtcataaaggaagtttgtatctggttaccgaatgttactcggagtcccggatgagatcccggacgtcacgaggagttctggaatggtccagaggtaaacatttatatatgggaagtcctgttttggtcaccggaaaagtttcgggttttatcggtaacgtaccgggaccacctggagggtcccgggggtccaccaagtggggccaccggccccggagggctgcatgggccaagtgtgggaggggaccagccccaggtgggctggtgcgccccccccccccacaagggcccaaggcgcctagggcttgggggagggggcgtcccaccaagcttgggaggcaagtttccccctctcccccttgggccgccaccctagatgggtttggggctgctgcaccccttggggtggaaaccctagagggggcggacccccctccctctcccctatatatacttgaggactttggggctgccaacacatgagttttgacctctccctggcgcagccctacctctctcccttctcctctcccgcggtgcttggcgaagccctgtaggattgccacgctcctccatcaccaccacgccgttgtactgctgctggacggagtcttcttcaacctctccctctctacttgctggatcaaggcatgggagacgtcaacgggctgtacgtgtgttgaacgcggaggtgccgtccgttcggcactaggacctccggtgatttggatcatgacgattacgactccttcaaccccgttctcttgaacgcttccgcttagcgatctacaagggtatgtaggtgcactctccttcccctcattgctggtttctccatagatagatcttggtgacacgtaggaaattttgaatttctgctacgttccccaacggtggtatcagagccaggtttattgcgtagattctttgcatgagtagaacacaaagtagttgtgggtgttgattttgttcaatatgcttaccgttactagtccaatcttgtttcgacggtattgtgggatgaagcggcccggaccgaccttacacgtacacttacgtgagacaggttccacggactgacatgcacttggtgcataaggtggctagcgggtgccagcctctcccactttagtcggaacggattcgatgaaaagggtccatctgaaggctaaatagcaattgtcatatcacgttgtggttttgcgtaggtaagaaacgttcttgctagaaacccatagcagccacgtaaaacatgcaaacaacaattagaggacgtctaacttgtttttgcagggtatgctatgtgatgtgatatggccaagaagaatgtgatgaatgatatgtga

SEQ ID NO: 16 - DNA, 26451 bp, Artificial Sequence
  Scaffold 1896571
cccccccccccctttcaaaaaaaacaaaaaccacagccatagaaatgctgacgcgtggatgcctattggtcccggttggatgcctgggctcagtggacaggccacgtggaggcccattagtcccagttctggattgaaccgggactaaagggccagggtattagtaccgaccctttagtcccggtaggccctcaccaaccgggtcaataggccctttttctactagtggagtatcgatcttctcaaaagcttccagctgtgctggattaagatcgccctcaggcttgcccttaatggcgtcatagcagcccatggtctgaaaccagtagactgctctcgtgcgccacctcttatattgcgcccccttaaaggcaggcggcttcagatgcgcagcaaaatcactcagagtaaattgtctataatcaggtttttggattgtcggaaatatgagcaaattactacgagatttaatccaaataaataggaaatggatcatgacagcaatagcagagattaaactaatcatgcgaactagcatagcagatgaacagatcacatctagggcacatactagaaacatgaattttaccatgatctcgaacaggaaggatagaatcacatacggtgcagcgggagcagcaccgccggcgttgacgttgtcgcccatgtcgtcgaggatgaggttgccgaggtcgggaaagaagtcgtcgctcgcgaagtcgtcgctgccagcagtcgcgcgagtgcgcttcccaaaaacctgatcgcccctctcccgtacaggatcacgagaggcggggttccggaggcctgttgtcccttctcccagtgcacgccgaaaggagggatggaaaagacttgcttggcggcgcaatgatctggctagggtagacgtctgcctgactatatagtgcgggccgggtaggtcgtgggagtaattaacgcgtccgttaattattaattaacgcgtccgttaattattaattaacgattcattaatttttccggagcagcaaaaatatagacaacgtgcatagctctgtcctcggctcggcaacccgcggcgcgcgcgcggcgcggcgaggaggaggagcgcgtgtaggtcacctcttctcaatctcatacaagtggtagaagagctcaccttataaagagatgcaactctgagagcggcgatagcgtggacgagcgcgtttgatcccggtacgtggaccaatggaataagtcgttcgtggtggggacagactgtagcgcggtaggtacgcgcacgtaaataagcacgtacggtgatgaatgcgtaacatggcccatggcatccgttggctgataacgggcgtcctataacatactcagttggtacagatagatgcataaggtacaggttttgtacagggcacgttttccgtcaacataacgatatacaatatgacggagaagatatctgcaaccccaggagaaccacaccaccgctccgaaagcttgaaccaagcaagcccaagatgactagcatctccaccttctcctaccctctggcttgtaaggaggtgacgccgctgcaatttcatccatcaggtgcgccttcgaacaccggccaggtgaccagcatctccaccttctcctaccctctgctcaagccgagcagtttagccacactcttgacaacacgagcctctggtggtagtgacaagacgtattggagcttgcttagatgtacagatccggctaagagaacaatgatattccctggtaaacaggttagatctatgacggcagccgacgtagagttaattacagggacaaaatctggtcctaagccgatcccaacagtggataaatccgagctgctttggaaagtgcaagatctgattagtgttccaccggctcgatacagataaaagaactcgttcatgtaattgctagcatatttcagcttttcgcccaggtttgtgattaatctacgtgcatgcatggtgcttgtgtacttttggctgttcctactcattgtgcatgtgacctgatacttagttttcttcacggcatgatcaggtgttcttttttgagtggatggatttcggagaagccaacgtgaagggcaacgtttggccacggttgttaagatgaaagaattattcaagttggcaagaagcggcgcattccatttcatggcaagaagaattttcaattatgttctcaattcaaaatttggatgcagttagttaatacaaggaagcatgtgcactattaccactcctgattagattaactgcttttctctcgcaacatgtacagacgaactccattgcctcttatatggcgattcagtgggaactgcgctgcatcaggatagcacacattcagttgctgccgtcaggattgctaccaaagaatttatcagcactgcagtgtgctcaaggattcgtgatgcagtgctgcattttgccatcaaccacaagccacctggagagactctgtcacatgaacacattcagagatgctcccatcttgtgctccagagtccagattttcaacaaacttgacaatggctccacctctctgtactctgaattcatgggcatgctcctagctgcaaagcaagagcagtcaaaagcgacagttcataaatcaaccacgcctgcagcaacacttgttgtccacttgtccctctcatgacttctgaaggttatatcactgcaaaaactctatacgtaatggaccccaagctggcatactcaccaaggagtacaatagagaagaaacacaaagacacaagcctgtgcattctacgcgccctctttcagtgccttcatgagtgttatacagattggcattttgctactttcccatggacttacaagtataacaatgcctggcatcagaacagcaccatgtaagtttgtccaaaacagaacttatgaacctcattttttttatacattcatctgtgtgcaaaaaactgatgatttagtacctgctaaaaaaattcagttctgagagtggtttctacgtactacactacatcagagagttcgatggtctgaagctgataacactgccaaccccagtaagttggcaaacctcttcattactattgagatcccaaacatgcagttactaacagacatgctccctgcagggcttaatttcatacctaaggatgcagatggcgtacgagattctcaggataaaggcaacaaggccgacttcccaaactacatgtatgattgcggcacttgtagaagcggtcgccggcgaactggccgcgcagtccggcagtggactaaaggcagggccaccggatctgcatcttggttggtgttcggcatgaactgcagctagagttcctcgctcgatttggggggagtcgagtaaacaggcttgtgcgggatagctaaataataattgtccttggtggaccccacatacgccgtttcctaccatgaaacgtggctgccgctcgtaaacggcgatacgaacgtcaacttaattgcgccgtcacaacccaaacggccgtccaatgacgacctcggtatatacacccttattttataggctgtactactgcgtacagctactctagcacgtatggcccacatggccacatcccggtaaatattgaacgattcatgataccaggagcgtgcgcgctcgtccgcgcccagcaatattcgatgcaactctctctcaacttatgaggtgaaactaaactttaacctcactcactccactcacatgtgtgcatgaatgggccaagggaattttagaattttagttgggctttaggccaaaagcccactagcaaattccaacacatataagcatcatgtaatgagcaagcagaaactgcagtagttggggcaatgaagttatactactacttgattgccccgactaagcagtgccgtgcagctagtacattagtgccacatgtgtgcaaagttcaaacttgttaatctacggaagtcgcgccaagatagacgctcaattgcggcgcctatcttataagaattggagaatatagtaccttgttttcttcctttttagttcatcatgttggtagggacctgaacttcccggcacacctctgtgcacagcgtgcttgtacggatagctggcttgatcaaagtccagattttcttattagcagcctacaggcagattgtaaccggatgttagttcgttgaataaagtctcaatttgatgcaaaaaatgcacaattgttgcatacatctctctacttattaagttttgtgtatatttaatcttgaatttttatatagtacttcctccgttccataagataagatgtttttgtcgtatattgtgggacggagggggtacgtactataagcaatcaccatcattcccaaatcaacatgttatgcaacatatatcaaagcaagtcctaatgcccccacaatgtaaataaaacaatagcaggtcctaatgagaactcaagaatagaaaaattcttgttttgttggtctctcccctacattctttttctttgaagacatagaaagaccgttaattctacacgacagcaatatattcatagatcacatggttgtaatcaataaacttggaatgaggtgatatggagatggtctagagtgagcttgaaattttgaaaaaattacagaagaagacatatttaaaagtttcaaaacaaattccacatgttcattaagagatattagcttgtgattacaagaaaaaaggtaaattattgtatttcaaaatagcaaaaggttgttagtgcacataggttagcctagtcgttgatttagttttttgtgcttaacaaatgaaacgctagtttttatttagtatttgttcaagctaaattgtaattattttaaagtgcctattcacccatcccctctaggcgacatgcacgatctttcgccgtgtctaacctaacctgtatcaaatctttatagctattaaagcaagatttgcgtattcatgaaagaaaaaaacatttgaagtaagggagggatcgactctttcttggacaagacaactaacgtcgcgcaagagaatttttgcaatattcaacaaaaccattaagatagcgaaaatatgaatatcgataaaaataactcgaatgcatggtcctataagaatttttgcaggtttttttatatttcatatgtttttctagttccactatttttttggaacaaagtaaaatttcgacttaggaaatacgagtacttggtgatgtttttcttaaaaagaaaaacatttaaggatgatatggcgtacacgtaggcgccacgtcataatgtttcccgttttgacatccacaggtggctacgtggccagccagcgtgggttaccaacccaccgatccaatcagccgcaggcaacaagcagaagtgctccccgtcgatctgcccgccgtgccggcaactgccaatccgtcattgctcgccgccgcagccgccggcccatcctgtcccatctggccttctgctctccaccgaccatggggggccgctccaagcaatcccggctcgcggcgctcgtacggctggctgccagccgcgcccacgtccacatccacagcgcgcggcaggtgtttgacggaatgccagagacgctctgagacgccatatcgatcccggaccacgcacgcgcgcaagatgctaacggcgaagattgcgagcccgagcccagtgtgcgcttcttcttcattgggcatgccctggccgcacgatgtgatggattttaccgaggtgcgtcatgcgtggatgtcatccctcccctctctgctctgcctgtgcacgcctcctggttgattccgaaaggtatgagccttaaaatttgattatttgaacaagacatgctgatcaacatttctcctgtccagacaaaaaactgggtctctgtctcgtcttaggattctccttcctgatgggcggtatttgttagaatgggcctttcgatgtttgtggattagtatgtaggtgttcacaccacaagctagcttttgctgcatgatgataggatagagccagaatgcagctacctggaacgtcactggccgcgtcattacactatattcatcattgaggtaatagcaccccatgtccctgaacttgcacaacatatgatggtttagtccttgtacttgtaaaactggattgggtagtccctgaacttgaagcagatgagcaagtttagtcctcggccaatcacatgcagccaagtggacggcaagtggacgagctggtcagcgcggcaaattttgcacttaggaccctaccgttttcctgtatctacccgcagtgcagcaccaggtgaaataaaaaacacctgaattaatgttgtctcatcctcctccgctttgattctcctccgttaattcaggtgaactccagttcagtaaacttggagacaacatgcagtatatattcaaacccatctactctaaagtggctgctagtatgttgctgtctttcactgttagcagtaatcaaaagtttagccgtcaatatattcaaacccatctactctaaagtggctgaaatataacacaattacgatttgctctttaaaaagagtcaatagcacatattaatgcacagctgttaaaaaataatatagaaacaagtaaggaacgaatcttagggacggacctggtgagaacgtagtttgggcctgcatcttatcgccctttactatacagagtagtttaacagcattacgagacaaaatcatcaccaagattaaaccgccaagcccgacatacaaaatttggtagtctatattttcacatacaaaatggtgtaaaaaaaactccattatatagaacctcagttttccagcggattgtctaaatttggtagtctacatctccaatggctattttttcaacagctactttcatcaatctggtgttccaacccaatttatgtcactcgatcctatattcatcatgtccagaaatgaggaattgttcatctgtgagcccatctcatatgagttttccatctgcacacaaacagcaattcagcaatatagatggatagcagtatatacagatagcagcaaaacaaagagcagtatatacaaatatcagcaaaacaaagagcaatatacagatagcagcaaaacatccctcgcgctcacgccttgcagcctccttcgcgctcgcgtctcgcagccgccctcgccctcgcagccagagccccacacgcatacgcagccggcggcggccggattcggcgtcagatctgttagcgtccaacttgatttagcccacactctacttacgttctggacgtgtatgcacacatggaccaacattcagtagagagcccactccatcccaaaagcccggacttataggaggagggatactctcccttataagttggtcatggcctcctcccgtaagcgaggtgggactaaaccaagccaacctccaccggtggacagcagccctaacatcccatccccctgagaagcccctcaggaaggcatggcgatgctggctctgataccagatgttagcgtctaacttgatttagcccacactctacttacgttctggacgtttatgcgcacatgggtcaacattcagtagagaacccactccatcccaaaagcccggacttataggaggagggatactctcccttataagttggtcatggcctcctcccgtaagcgaggtgggactaaaccaagccaacctccaccggtggacagcagccctaataagatccatctcccccatctccctgccccatctctcccatcgcgctctctctctctctctctgaatctgaaaaaacagggcgtacctcagcgacggcgagctcgaggcaatggtgcaggagtcctcctcgtctccaactaccccggattggcgcgggaacgagctcgcgagtccacatttggacgatgtgtagctagtttgatggatgtctaaaatttagagcacgccatacaccagccgctggagatgttttttgccctctgatggtctatgtattgacttagactatgggatacacaagccactacagatgctctaagctaggtcacacacaacctccatgctaccaagctactactactaagtgctggcggtgcaaaattagtggatccaggcaatgggtaacagaacacccatgacaggcgctgcctgaaccagggaggatagaaaaaccactgcacctaccacgccaccgatgaactcggccatgccatgcaccccgaaggtccaagttaatgcactgcatgctacaggacgaggacaggctaccactggtcaccaccgtcaagccggcgttgtgatcaccggaagatgccatgccatgagtgacatgagctagggaacctgcagcaccctctgcaccaggtgtcatgagctccagttcagtaaacttggagacaacattaattcaggtgttgtttatttcacctggtgctgcactgcggatagatataggaaaacgataggggcctaagtgcaaaatgtgccgcgctgaccagctcgtccacttggctgcacgtgattggctcaggactaaacttgctcatctgctgcaagttcagggactactcaatccacttttgcaagtacaaggactaaactatcacatgctgcgcaagtacagggacctggggtgctattacctcttcatcattcatgtgccacggagagagatacacataatatgttcgacatgagaaagtgcaacagctaatagctagcctagcacgccaaggtgtcagcatgatacaatggaacatttagacactacattaatcaagtacctaggttgtttagagccgtatttttatctgtgctagtacaatggacagttcatagatgccgactccggcattattttcgggcatcttaaacaaattggtcttggtatggacataacggactaatggtaagagttgactgaatataacagaaagatgtggcataggatgccatgtcttggtaccctaccccttgtttaattcgtgtttggatacgtaatctctgatgtcatgttttaagagttgacccatatgttaaagaagatacgtaatctctgtgctagtacaatggacagttcatagatgccgactccagcattattttcgcgcatcttaaacaaatttctcttggtatggacataacggactaatggtaagagttgactgaatataacagaaagacgtggcataggatgccatgtcttggtaccctaccccttgtttaattcgtgtttggatacataatctctgatgtcatgttttaagagttgacccatatgttaaagaagatacataatctctgtgctagtacaatggacagttcatagatgctgactccagcattattttcgggcatcttaaacaaattgctcttggtatggacataacggactaatggtaagagttgactgaatataacagaaagactgtggcataggatgccatgtcttggtaccctaccccttgtttaattcgtgtttggatacgtaatctctgatgtcatgttttaagagttgacccatatgttaaagaagattaccgttaggtgagttcatacactactagaatcttatttttgtcctgacggtgcgaagccaccagggatagaggtactgaaagccgtcacaaaaacttttcctgtagggtttccatcagcaattacctgatacagatgctcatccattaagggctattgttgctggcaggactgacatggaaagcttctctgaggccaactccatcgcgtgaccctaaacggacgtccgttttgtccggtttctgtctgtttggatagggatttggggtcgtgtccgggcctgccttgggatgcggtggccgtgcgcccagcgcgcggccgcatccatttgccccatcctgtccgtcagggccaaaaatgcccatatattcatatgaaaactagtttgcacgttcaaatattaatgtctgaaaataaaaatagttttacaacccaatcgaaattgtctctaataaattggttttacaagcaaatcgaaattgtcttcaacgaacataaaatgaaccaatacatctattggttgccaatgtgatcccagacgtgctcaaccaagtcattttgaagattcaaatgagtgtgccaatcacgcatctcacgatggaattggataaactgttcaaatgtggccgggtcttggtgcaggtgctcaatattttcaccttgataatcaaatccttggtcgaagatactctcatcacgctcgtcctcgacgatcatgttgtgcatgatcacacaagcagtcatcacctcccaaagcttcctttcatcccatgacagtgcagggtttcgaacgataccccaccgggattgaagcacaccaaaagcacgttccacatcctttctagcactctcttgcatttgggaaaatctctttctcttcccaccttggggtttcgagattgtcttcacaaaagttgaccactgaggatatataccatctgctagatagtatcccttgttgtactgatggccgttgatctcaaagttgacaggtggggagtggccttctgcaggcctcgcgaagattggagaacgctgcagcacgttgatatcattgtgagaacctgccataccgaagaaagaatgccatatccaaagatcttgcgatgccaccgcttctaatatgacagtgcacccgttaacatgccccttgtactggccctgccaagcaaatggacaattcttccactcccaatgcatacaatctatgctgccaagcatgcctggaaagcctctagctgcgttggtcgccaacaatctctctgtatcagcggcagttggctgcctcaagtactctgggccaaacacctcaatcacagcgtggcaaaacttgtacattgacatcagacatgttgtctcactcatacgcacatactcgtccaccagatcgcctggaataccatatgcaagcatgcggatggccgcggtgcatttctggtaagaggagaatccaagcttgccaagggcatccgtcttgcactcgaagtatgggtcatgagcaaccactccctcttggatacgattgaacacatgccttgccatacgaaaacggcgacggaatttatccggcttgaagagcggggtgttggcaaagtaatcggcataaagcagggcgtggcctctctccctgttgcggttcaggttgggagcacggccagggagtgaccccctgtaccgaggaagctaccgttgaatatggtcgtgaacgaccagtgcagccaccacatgatcttcatcatccgacgacgaatcgtccgatgaacaaaggaagtgatgaaagaaaaactcgtctccactgtccatacctttgatggcaaaaggtcgaacaccttgcggtcgtggtggcgaagaggccgcgatgatcacctcgacgcagcaggggtggttgccggccggccactggccgctctggagctctccttggaatctgcctcggcctccgtggtccgtcgccggcagtggtgtcccctccgccaccggcaaggacggcgatggccaaacctcccccgatagacgaccaaaactacggcgaaagcgcgggcgtggtggcggccatgtcgagacgtggtttggtatggacggcggggggctgcgcggtgaggaggcggccggagaataggggcggcgccgacggcggggcggggcggggagagagggtgaagcgttgggagtggagggactggtagtttccccaacaggcgggccacggggggacaagggcgtgcgtcgcggccgtccgcgctcgtccgtttcaccccaaaccgagcgcaagtttgggccggggatgggtcgaaaacgggcggaatccggacatttgtccgtttgaagctgcgcgctgggccgtctcttttgtccgttttactccaaacggacgggggcggacaaaatagggtcgcgcggtggagttggcctgaccattatctgtgatggttttctgtcagtatgtcgccagacccatgtggagagacagcatctccgggcgacatgtgccataaatagttgtcctgaaatcataactgataggacactccatacccttctctgccagccttcacacaggcaggaatatgtctcgtcaagagttgtggtattcccgtcggcttcaaccgtcaatcagtggcggacctaggaatacggcaagccccaggccaccccaggccatcttcgagcactgtagctacaatgctgtgctgtagctatattcagtaaaggaaatcgtcgccacgccccaggcagcagcccgggctgcctggggcctaaatccgcctctgccgtcaatggtagtactaaatgccaatatgcctattttagctgaacgaaaacaatttgagcttgcgcatataaaattatccttccctagttttaatcatcagtgttgtggtgatatgtcatctttgtcaattcatcacattagtatgatcatccccaaggttgtgtgctaggagaccgggctgcccttttgcctttagtatcgcatcgaggacttacattgctgcccttttgcctttaaaagagacagctcgctgatatgattaacaaaacctaacactacgtctgccttgcaaagtgatttttttctttttggcaaatagtcatgtcccaatagtctagaatgacatctagagaaaacacagtgaaaaaggtcaatattgaccactaacagaaaagtgaagtgcaaatgtatattgtagctccatacttcttgagtttcacaattagtgtgcaattcgatgtggctctggttttaatttattcaagccactgtacagttccttataaaaccatatccggcaagtgctggagaatctgctagtattatattcagatagtgcttgcgtgtgtagactttcacagggaggtgcatgcacaaatggaaggaagaaaggccccccaagtttcagagcttcctctgcagcaaacaacaaatcaaactgcccctcaaagcccccctcccccctcccaccccagagcgcacccagtcaatctcttgctaccaatcctaacaaaacccagaaattttcagtaggaggtagtgaagactgaggagcaccaagggtgccaacaatggagttggtggtaggtgcttcagaggccaccatgaaatcgctcttgaggaagcttggaggtctgcttgctcacgagtatgctctcatcaggggtgtccgcggcgacatccagtacatcaacgacgaaatggcgagcatgcaggcctttctggtcgacctcagcagcactactacccagggccatgaccaccggatgaaagactggatgaagcaaatccgcgatgtcacctatgacattgaggactgcgtggacgacttcgcgcaccgcctctcccatgaccctggtggcgaagttatctgcgcatttgtcatgtccaatgtctatgaggtttggacgtggcggtctcgccgcaacattgcttccaacatcgctgagctcaaggtgcgcgcacagcagattggcgaacgacgtacaaggtatggtgttgagaatccgaagagtggtgtcagggagtctggtgcagctgctactggaagattccaggctgccgagaaccaacaggcgagccttgagcttgttggtacaaagaagcctgtgggagtggacaatgacatggaggatctcgggaagtgggtgtccttgcaacaaccagctgccgcatctcccacacatccctcctcatcagcttctacatcccaaactgtggctgagaagcaagaccaaggcattctatccatcttcgggttcggaggggtgggcaagactactatggccatggcgttataccagaaatttggtgaccaatttgactgtcgggccatggtcacggtgtcacagagctccgacatagaagcaatactacgaagcatacacagtcaagtcatgccacaatccaaagatggtaatgagcagcaaggcagcagcggtgtcagcacctcggagaaaaatcgcctcgtggctgccatgggcagcctgtgggattctgtcataccaaagggccacgaagacgatgagcagcgtggtggcagtacctcagatattgcacgagatctcatgaagcacttggaggaacaaaggtacaacatatttttcaagttgagtttgcgttatggttaataaggtcattgctaaattatagagttgcatagtatgtaggaacaaaaaacaaaggtagatccgcaagttgctcttcgtctggacataatagcctctcattaaaaggaaagaaagaataaaaatgtgtggctagtataagaccaattgtcatttgatcataaacacaagcaacttattggtcctttaatcaaaattgcaaaagcgttgcacacaaaaaagtatatgccagtttaatactgcactttttggggcataagttattagtgtgcagttcatttccatgctgttgtatatcattattctaaataagatttaacatctcagatccacatattaagatatttttaacaaaatttcatagtatgcaggacacatcgacatgcacatgtgaatatggagctgatatttgagtatttgtagttcatagtatgcagttcgcgcctgtagaatatgtgggtctatactctataatagattgagtatttgtatatgtgcacagtttgtcttttttttttgtagcttacatattaaatgaaacttcgcatatatgtaggacacatctacatgcacatgtaaaagttgtttcagctgtatttgagatatttaaatttgattttgtaatatctgaaaatcttggactcactggagccagcgatgatcgtattccttttatttaccccattacagtgataagatagaataacatactgtaaagagtttatttaaaacgtactactcttgatgtatctttcttctcgttgcagttacttgctcttagttgatgatgtatggtctgcatcgatgtgggacaagataaagaagtcactgccaaccaagtgtaagaaaggcagtagagtaatagttaccacacggtttcaagcagttgccacagcttgcatcagggataaaggatcagatcttggtcataaagtggtcgtacttagcgatgacaaagctaaagaactattcatggctgaatccagtatgagtagagaaaagcagaagagaattccacctggactttggaaaatttgtggaggcctgccgttggccatagttgccatggctgggcacgcagcctgcaacccagaaaaactagagaaggactggaaggaagtttgcaccaggttggtaccggactttgggaaacctcttggccaggacagagtcacaaggatactaagccattgctataatgatatgcctgctgagatcaagacatgctccttgtatctatgcatatttccaaaggggcgcaagatcagcaggaagcggctgacgaggcgatggctagcagaaggcttcgtcagtgacaaggatgggctgagtgcagaggatgtcgcggagacatacttcaatcatctcataaagaggaagatcatacgtgctgtggagcacagcagcaacgggaaggtgaagagctatcaagttcatgacatggttctcgagtacattgtgtccagggcaagcgaagagaactttgtcacggtggttggtggtcactggctcatggcgccgcctagcaacaaagtccgccggctgtccctccaaggtggtgactccaaatacaagaaaggaatggatggcatgaacttttctcatgtccggtctctaaccttgtttgggagcatgacccaactgccttccaattcattgaagtttggaattgtgcaagtgctagaccttgaaggttgcaatgattttaaaaagcaacatgccaaggagatatgcaagatgcttctactcaagtacctcagtctccgaaggacagagattgacaagatccctaagaagattggaaagctccagtatttggagactattgacataagggagaccaatgtcacagagctgccgaccactgtctgccagcttgaacgactggtcaacatacttggtgggaacaaaagaacacggaaggcactgaagcttccagcagacctgaagaaggaaacaatgaaatccctgcgcatactgtcgggcatcgagattgatgaggggtcagcagctgttgtggcagaccttaatcatctaactgaactgaggaagctagccatttacaagctcaacatcagaaacggaagcaagcttttcagagaattaagctcctcaattgagtatcttggtggctactctcttcacaccctcataatctttgacgagtcatctgaatttctaaaattgctgagtgctctctctttccctcccaagtttctcaatgctcttgaactgtctggcaagttggttgagctcccacaatggatcacagaacttgatgccttgacgaagttggccctctcggtgacagtgctaactactgatgctttgcaccagttgagcaagctcaagacactgttttctctcacgttttcacttacttcagaaaaggtggattctgaaacagctgccaccataggggaaaacatggctgatggcgagatcatagttccagctagcggatttgaggagctcaagcttcttcgcttctcggctcctttggtgccactgctaaccttcccagataacgcgatgccgaagctagaacggattgagctaaggttcggcaatttgggtggaatgtatggcatcgaaaaccttcaaggtctaaaagaggtgcatctcagaatgcatgacaaagcaggtgatattaccaagttgatggtagacgaaatggcaactgcagctagggaagatgacaaaggccccagaataattgttgatcagtatcatgagtgagtgacccaaaagtcaatctacttgtttattattattctttgattttttttctaaaaaatattctgttgtgtaattctatcatgagtaattctttgtgcaagttcagaacagtatttacttgctgtatttttaattacatcttgagcttcatctgtaatgatttacagtgctcgagcaagcccaatgtatacattttttttgtcacattttcacgtccgtccgtttttgcgatctgggagtttctggccgtttgatcaccttgtacacccactcgtgcggaactggctcagctgtcctttgggctgctgctccagaggcctaaacagaactctgtggtaaactgggctatgggctagccgagtccagcccagctgcgcttcggtcaaggggcccgtgttgcggctcgccaaaaaacaaaagcaatccccgatgcgaggcgcacataggagcgacacttgattggatcgggatcgaggcaaggccatgcgcgtgcttcagggtggacgaaacggtccggtccttcggcccggctcgcggcccgctcggtgcaggtcggctcggtccaggcccgctgaaaaaagtcatcggtccggtccctagaaaatggaccgaaattttctcggtccggtccggtcaaagctcggtccgctcgttcggatcgcgacatttagcccagctcacaggtcacagcccacagcaacccatatagagcccagtgcgtaaaaaaaacgatatagagcctagcgcaaagcagagagtttaagtacgcaaccccgagcggtcgagggccgcctccgccggcttccgtcgtcgaccacctcctggtgctgccgtcgtcaaccacctcgccgtagaccacgaagccgtagtactggagggaaagaggagaagaggagggagcgcaacgcgtgcagctgcctgccgtcgagttgagggtcgaccgccgccgtctccacctgtccgccgtcgaccacctcctcgccggctcgctgctgtcgatcagagatgaccacgaagctggaggagggggaggatgtgcctgcacctgcacgccgtctcccctgcacctgttcgatctcctctgtcctctcctctgcattatcccatctctgaccgaggtattcagtgccaaaattttcaacaattagtactgaattgttagcagttcgtactgatctattgagtgttgaatacaacattgttagcagttagtactgaattctcccaaaaggatgactaaatagtggctaaacaaagccaaaaatcctcccagcgcactcccaggatacaaattcagtcgatccagtcggtcctctcggtcttgaccgagctttggagaatcgattttaaccccccccccccccccccccccccccccccccccccccccccccccccccccccccccagctcgcgcgcctttgatcttaagcccctctgttcgtttgcctttctctcaacccctccagttctgtctacttgttgctggtaccccctttggcattgttaacaactttgttagtatataactaacatatagaaataggaatagacaaaagtacccctctgtttgaaaggcacatctctgtaccttgtccgaattttcaaacatgctccaaaagatattttggccaaaaaagaaatgacatgattttctaaagctgtgtgctatgtttcagaaaaaaatttgacatgattttgctgtaatcaataggcttccacacaaacagactggaaataatatagggtcacaatgattcaatgatagcatagagaataattcagccatgttctacaggacttcatgacagcaaaataagtgagtctttacctcacatacataggaaataaaagtgagtctctaactcacttacagaccaaataaaagtgagtttgcatctcacatacagaacaataaaagtgagtctccactaacagccaagttcatcacagccacaaacaagttcatcatccggctcagtttttaaaccaagcagagcaaacatggctttctcgtccggcggtttttcatccccatcattttctggttcaatcacaaggcttgaccaatcaatagtagcactaccattttctacttcattgcatgagatcgcccccgtggttaggtttatcacactggattggttagaatcatgcacagacattgcatcgatcctattcaatatagacagaaaaaatcagaaaatgcacacaccaaaactcatgcatacatcaattagaacaggggaatatgatgttaccttttcagatgcatcacaccccttagtcaatccagcccctcccactcaaatcccatgcaaatcacacacaaaacctagggttccacgatttagaaactgtaccagaagaagaagagcacaaaatctgtgaaaaatacgaaggggaagaggttgccttaccttgggccagcgatgggaggcggcggatgggggggaaacgcggcggagcagggcggcagatggcgggcgcagcggctctggcgactggcggctggcggctaggtcaagtcggggaggagagatagaatgaagaacgggccaggcctcgggcctttgtctcgtgcgtttgaggaaaactggacaagggcagatttggcatttccaaatttgttaagtccagattctttcattatgcgctaaatgaatagataacagcgctggaggggcaagcgagccaaaattaagccgcgtcgggggcttgagagaaaggcaaacgaacagaagggcttaagatcaaaggcacgcgagctggggggttaaaatcgattctccctgctgcagcaggtccggtcctgaaaatatgaaccgccagccacttcggttcggtccggaccggaccggccgcggccggtccaaagcagggctcggtcagggctcggaccggcccggaccggcccggacgcggcgtgctgttgattgattggagccgcgggacgcgactcgctcgaggggttcgaggggttccggcgagctccatggaggtgcgtgcacaaagaggtcggccgggcgcaggctccggccaggtgcgtgcgcatggaggtcggacggcttcaaactccgtcgaggttagtgcaaggaggtggacagccggccggcggtgagctccgtccatgttcgtgagcggcaaggataccaatcatcttcgagttcgagcgagcttcgtgtccccccttctcgttctcattgtttactttttagtttctctggacgtcaaatagggatcgatcttgatctgtgtttgttctgtatcaggtggaattttttttcttttcttactgtgtcgaaccgcaagagaatcgagcctcttgattggatttgtgctcttgttcatcttaggaattgtcttgtgctattgcagtttgtaaacattcacggggaagatagggaagatcagagtaagaagaaccataatcagtatttaaagttctcaggtgcaggtaacgaaccaaacagcatctccagtaagttgcctctagaaataaaaaaaatcctctggccaccttttttccaaccgggctacacccctttccattaattgcctaacggaaatattacagtctcagttgtttcaagccacagcacgctgaactacccgagaccgactaagcaaaagaagatcgaaaggggagaccgagttggagcatcaacaggaaacccgcaacaaatgactctaaaacgagtcatccaccgcggggcaaaaacctgttgacaccaaccatcccaacctcgaaacgaacagcacggcgaacacttcgcgcatcaggactaaagtacgggacaccactaccaaaaggagccacagaacactctcagcgggcatcaaaccccagtaagaacatagacatcacagactactgtccagaacaacttcaagcccccgcgccatttcccagcatgagccttcccctgggagtagaacggtccgccaaaaacgcagccacgcgcaccatcttctgcactccagcctggactctttccttgtcaatccctttcagaagacctgactaatacatcaaaaaggaacacgcagtgaaaacagcctccaacggagagcgaatgacacagttatcgaaggttgccttgttacgggtgcaccaaataccccaacatatagcagcaaccatagacatgtaatgctttttgcccccaggaagatatttatagagccatacccagctctgccaaatagatttaggagtacaggatgctcccaaagcagccccaatcaccccccaaacagaacgggcaaacacacacccaaaaaaaaggtgatcgacagtttcaatatcatggtagaacgaacaaattgggttccctggccaatttcttttacgcaggttgtccctggtagggatggcattttgaaacagttgccaaaggaagattttgatctttagaggaatcttagctttccagacccactagtaatcaggtcctgatatatctttttctaaccacttgtaaacagattttgttgtaaaatctcctttgctattaaacttccaaacaacttgatcaggggaatcattcaaaggtagctttttagccccatccaccacattagcccactgatcagatagctcagcaaagagattacggcggaatcccatcacaaagttattagtagcaaaataaggtgcattcttgctcttgacaaatatcatatagagcagggtaacaaactttcaaaggattctcagatatccaggggtcgtgccagaccctagccaggtcacccatattaatgcggatccctctgccctccatatacacctttttaactttcataatagctttccaacaaggagagtcattaaatctgatatgtacattagccaccgtcttgcgcttaaagtaccgagcccgcacgatcttttgccacaacccatcacctgactccaacttccaccaccatttaactaggagactaatattctgtttatgcagatccttaatacccaatccccctttattctttgagcgacagactctggaccacttaacccagtgataggaccgtttatcttttttcctcctccaaaagaagcgcctacgatgtttattcatcttctcaataaacgttttgcaaaggaggaacatagacatgaagtaagaaggaatcacatctaggctagagttaaccaaggttaatctagcatcagacgaagcaacataactaatccaggcagccaatctttttaagagcttagcatctaggaagtcccggtccacagttttaagcatggcatacgtcactgggacccccaaatatctcataggaaacttgccaatctggcacccaaacatcccagcataaaattgatcgatatcattatccccaccgatcgagaaaacctcgcttttatcaaaattaattttaagcccagacatcaattcaaacaaatagagaagcagcttaacatttactgccttgtccacatcatgggagaagcaaataactgtatcatctgcatattgcaatattcccactcccccctcaataagatcagacgcgagcccctcgaacaactcatttttttggcagccaggaccatcttggtcagacactcagcggccatattgaacaaaaaaggggaatgagggccaccctgacgcacccctttggcactttgaatatagggcccgagctcatcattgatcttgacactaaccgtgccaacacgaagaatctgggacacccacccacaccacttagaattgaagcatctcttactatgacaatcaagaaggaaatcccaattgaccttgtcgtaggctttttcgaactcaagcttaaggacaatccccgttctttttttcacatgagtataatgaatgacttcatgtagcgataggatcccgtccataatgtccctcccttttatgaaggcattctactgtatactaaacagtttgggggcatacacactcgctctcctatccatgaccttggtgatcagcttataagggcatcgcaacaagcaaataggtatgtactgttgtattctattggcctccgaggttttaggcaaaagggtgataatgccataattcaagcgttgcacatctagtctgccctcatgaaaccactcaaaaagcctaaggagatgcatgcaaacaacatcccagcagtgctggtagaattcagcaggtacactatcagggtcaggtgcacaattaggctccatagcaaagagagcagctctcctcaagggaaaagggtttagttaactcatcattatcgctcaaggatattttctcctcactaaaccacaaggatgcgtcaacactacacatattactgggtgcaggtccaaacaattccttataaaagtcagtagcatgggctagtagattcttagtcccctcgatagtaacataaccacattcaagagaacgcatcatatttttcctgcgtctcccattggccactttatggaagaaatcggtgttattatcacctttcaatagccacctctcggtagaatttttgatgccaggatgattcctcttcaaggtatatactattaagttccaccaggatatttaacttcctcgtatacgcctccccacatagatcatattgttcttctaacagctcctactcctgaagctccaatctaagtaggttcttcttaatcctacatttgccaaagttatttgagccccaccctttaaataatttcttcatcctcttcaacttaatgttcaacacatcaatagggtcctccgtgtacacaggcctggcccagatttcagaaacaagcggtaagaactctggattgctcaaccaggcgttatcaaacttaaaacatctattgcccggggccctggatggagccacccccccccatccagcagcaaaggattatgatcagataaatccttgaccaatttagtaaccgacaccaacgggtataggtcttcccagtcggaggacatcaagaccctatcaagtttttccaaagtgggatgttcttgtttgttagaccatgtaaagcacccaccacccatgaaaatctccctcaggcctagtagatggatgacggcattaaagacatccgagaaatgggataaagggctctttttattcttttccccacagtgtctaatgatgttaaaatcaccacccaccaaataagagttttaaccctacgacagaaggaggacaactcagccaaaaattcaggtttattttcatcgtgggctgcaccatacaccaccaacagagcccattcacatctcttaaccttgtcaaagagagtgatctgcaatatatatttaccacgcacaacatctataacctcaagtgtttctagtctcaatccacataaaatccgaccagacttcccaatcgataggatccattcccatctaaaatccgaatgggggtcaaatctcctaaaaaaggagggattataattctttttcatggtctcttgcaaaccaatgaagtccactttattggtattaatgatatccgtgaggcaggaagccataccaccttttcctgccaccctacaattccaaaaaacccctatcatttataacgtccaggtttatctctcaccctggtaggcctactaggattcagagtagacctaccctcagcctcttttttctgtttccgagtcatgggcctaattgtgatgttaggagatgaaaccacaactttatctttcttaggggattttttatttttttctcctagaatacacaggaataaatggggcatcatcttccatgacctgatcatcccaggttaaagagagaggagcagcattgcctaagccatctttgatggtaatatccctaggactagttactttctcatgcagcacttgcctagataattcaagttcacgaaggatattaacagtattgaaattatcatcaggtatattaacccccataagcgaggcacggagcatgatggctgtgtcagacatgacagagaattggttaccaacagggggtgaggaagtaccttcaaagttgcgcttcttcatgcgatccgttgccctctcctccaccctagcgagtttttgatactgattgcgaccctcaggtccagatgacacatgtagcttctcatggataggagatccagtaggagattcaacagtatacatactgcgagtctcgctaccttccttcgatccctcctccagctcaacaacccgaggcatattaggccatgccacatagtctgacaaacgaggaatagtactcacatcatcttttccatcataacacaaaaaggcaggtgagggagggataggagtcaaagcccaagcacctgagttcagcttctcctcatgcttggatgagccatccaaggatacattatcattcctgccaaggttgctctctgtgctcacatcattctgtccagaggagttcaaagcttcatgctcttcagccatggtatgaatcaggagctcggtatgatttccttcatcactctcttcttcctcttcattctcagaaatggcagacagccgagtggtagcagaatagttctggcaaaaggaatccccagcaacagaagcacatgtccctccttgctagaattactgtcaacaggaatagaatactgactcgcaccaggagcacccaccaccacacgttccacttcatagtagaaatcatagaattgttctcccaacattccctcagcagacggtgggattttatccacttccctgcaccccagaagtatacgagcatactcaagtttatgcagagtagctttatccacctccaaagtgacccccaccagcgccccagcatatgaaacatgttgcacacatcgtttctccaaggggacattgcgaacgcgaacccaagctttctgcagatcatctttggcacccactgacgcagaccaaggagaaatagacaccacaactgaatcattcagaataggaagtctcctaccatagcagcaagctctttgaacttcacgagcattaggaaatctcatcacaaactgcgtggggctaatttggcgtgcagtgcatcgccatttcttagatttttgagcaaagaatccattgaactcagtctcaatttctttcacagatgccacaccctccaccaaggtaatcaccacagtattagttttctcattggcctgtttatccgcacaacaatcagggatgaagaagaagccctgcccaggggactggaaaccgcacatgaacggaacacattcccggggttgaggaatctgacatagctgcgccatgtgcccaagtttaccgcatttctcacatcgaatggtaggaaagcgaggagcaaaatgacctggaaggttgcagttgaggcagcgcttctccccgcccttgctgacaggagcagacggagctggtgggggagccagatctccatccttcgccgccgtcttgtccgtgtgggtaggccgctggtccctggagcccccgccttgcatcttcgccgccgcatcccatctgctccccgatgccgcacctccagatctggcacctccgggcggcggggggg

SEQ ID NO: 17 - DNA, 22991 bp, Artificial Sequence
  Scaffold 1528020
  misc_feature (1)..(147): n is a, c, g, or t
  misc_feature (1079)..(1339): n is a, c, g, or t
  misc_feature (3165)..(3836): n is a, c, g, or t
  misc_feature (5409)..(5939): n is a, c, g, or t
  misc_feature (7549)..(8002): n is a, c, g, or t
  misc_feature (8245)..(8403): n is a, c, g, or t
  misc_feature (11133)..(11234): n is a, c, g, or t
  misc_feature (11373)..(12998): n is a, c, g, or t
  misc_feature (13468)..(14826): n is a, c, g, or t
  misc_feature (14977)..(15110): n is a, c, g, or t
  misc_feature (17246)..(17351): n is a, c, g, or t
  misc_feature (20328)..(22982): n is a, c, g, or t
nnnnnnnnnnnnnnnnnnnnnnnnnnnnnnnnnnnnnnnnnnnnnnnnnnnnnnnnnnnnnnnnnnnnnnnnnnnnnnnnnnnnnnnnnnnnnnnnnnnnnnnnnnnnnnnnnnnnnnnnnnnnnnnnnnnnnnnnnnnnnnnnnnntccatggtacagaccaacgcggccagagagctcaccagggcacccgttgaagtggtgaatccgttgggagcgagtctctcgtcttcctccacagtcagattcctgaagaccctctttgctgcacgtcgcatctccctcctcgcggcgaaccaagacaccacctcttgagccctcgccagcttcgcctcgacgccgctcgccagctctaccatggccctctccatcttcaatctccaatccgccatcgcctcggctctcctgagtagggtttcgctcgctgtggtgggagaggggggaattttggatgcgttgcgtttcccagccaccgggtgatggggatttattgcccacactccacccgcattcatggcggtagctcgcctcggaatcctcccgtcgcctcccctcccccaatcgagcgaattccccacacaagccaaatggcacggaaaccaaatccttgaccgccatgtaattacctctctggcttgcagtcctcggctgtcgatcaaccggttctccgcatcgaggaggagaacctggccaatctccctctggatcaccaccgtcccctggcgatagcagagcacccccgccgcgaagaggttgggaatgtagagagccggccaagcctctctcccgtcctccgctcgccgctcgtcgtcggcgggctccctccgaccactccggtgtggggagcggtggtcgcccgagtcgcccttccggttgcgtgtgctagttgccatcttccgggtcgaatatgaaatgaacaatttgtgtcattgtgtgttcagtgctatctagagattaattatctagttatattaattttcatacatgctgcaggtgtagaagacaacatgtaagcagaagcaactatgactaattaactagctagcgagccagacaaggcaactcactaattaaagagnnnnnnnnnnnnnnnnnnnnnnnnnnnnnnnnnnnnnnnnnnnnnnnnnnnnnnnnnnnnnnnnnnnnnnnnnnnnnnnnnnnnnnnnnnnnnnnnnnnnnnnnnnnnnnnnnnnnnnnnnnnnnnnnnnnnnnnnnnnnnnnnnnnnnnnnnnnnnnnnnnnnnnnnnnnnnnnnnnnnnnnnnnnnnnnnnnnnnnnnnnnnnnnnnnnnnnnnnnnnnnnnnnnnnnnnnnnnnnnnnnnnnnnnnnnnnnnnnnnnncatcacattgggaagaaaagtgaatccgaaaacaatgggttcgccaagaagactgttcggctactaaaaaagctgagagtccgccatcagatcgcaggtcggatcaaggagatcaaggcacttgtgcttgagataagtgtgcggcgccaacggtacacgcttgacattccccagtcaagaactgtggaaattgacccacgagttgccatactctacaaaaatgcagccagacttgttggtgtggacgggccagcggaggagcttgagaacttgctgatggatgaggaccagaaattaaaggtggtgccggttgtgggatttggtgctctagtaaaaacaacacttgccaatgtggtatatggtaaactcaagaacagtttttcgcattgtgcttttgtgccagtctctcagaagccagacatcacaaagcttctccatggtttaatgtcccaacttgggtgtacacaatcttctcatcattgcgagttaaatgtccttctcgaccaacttagggaacatctctacaaaataagaggtatctgtttctgtgtgcatgctgttgtatgttagtgttttcaatatgtctcaaaacacaatgtatttagcttcatccgttgatttggacgaacctgtacgtatatttttgcagtattcgaaccccatagaaataaaatgctcctaatgaaatgcaaacaagaaaaaaaattgtgaagaagatatgcatgcatattagtttcgtttgctataaactttgtcgtgtaacagttggatcatcttaatttggactgctcctaagtatcttatggctggcgcatttgttacacagaaaagtgttaatttgataaaattttgctcctacgtctcaaaatacaatgtagctttgcccgttaatttggataaagtttatgttctgcgagtattagatctccagaggagaaaatagatgttcctaaagaaaagcaaacaagtaaaaaaagtgaagaagaatgtgcatacatactagtttcatttactgtacacttgtcccgtaagagtaaattgtcttcatttaaattattcctatgtttcttatggctggccaacatttcttaaatacaagagtgttaagtacttttagttcatgtattattagttttacataaataataacttaattatatactttaattctgtttcttacggcttgtatgtttgggtggatttgggttgaaaatttggtttacgagtcgacgagtcgttccgaggttgtgggggaggagagcccgccattggcttgatttgtaatcatgaaatatttttttttcatatatcgccatgttgaattctcttttgaagtatatgttctcatgtcaaatgtttttccttgaatatttttgtatgggaaggagtaacccatttttcctcggataaaaccccttttaagaattaacaaatgtgagtgtaagtatagaaatgaggcatcacatgacatagagtacaaggtagagcgctcagataaagagaatggaaaaacttcatcaaataaatcctgacatagaacctcagaaaaatagaaccaagtaattcatcgagatattgcttgatgtagagctggtatctttgttaaatgaataccttttggacagaaaatcatctcaagcacagatcattaagttgtagctcaaccttggggaattttagtcatgtcaaccaatgagtttgttttcttattcaattgcaactactatttgactgaataaagttaattttcactggtttgatcttttaatattaatatttgataaattctgtgctacttgacttagcattatgctaaatgtttggcnnnnnnnnnnnnnnnnnnnnnnnnnnnnnnnnnnnnnnnnnnnnnnnnnnnnnnnnnnnnnnnnnnnnnnnnnnnnnnnnnnnnnnnnnnnnnnnnnnnnnnnnnnnnnnnnnnnnnnnnnnnnnnnnnnnnnnnnnnnnnnnnnnnnnnnnnnnnnnnnnnnnnnnnnnnnnnnnnnnnnnnnnnnnnnnnnnnnnnnnnnnnnnnnnnnnnnnnnnnnnnnnnnnnnnnnnnnnnnnnnnnnnnnnnnnnnnnnnnnnnnnnnnnnnnnnnnnnnnnnnnnnnnnnnnnnnnnnnnnnnnnnnnnnnnnnnnnnnnnnnnnnnnnnnnnnnnnnnnnnnnnnnnnnnnnnnnnnnnnnnnnnnnnnnnnnnnnnnnnnnnnnnnnnnnnnnnnnnnnnnnnnnnnnnnnnnnnnnnnnnnnnnnnnnnnnnnnnnnnnnnnnnnnnnnnnnnnnnnnnnnnnnnnnnnnnnnnnnnnnnnnnnnnnnnnnnnnnnnnnnnnnnnnnnnnnnnnnnnnnnnnnnnnnnnnnnnnnnnnnnnnnnnnnnnnnnnnnnnnnnnnnnnnnnnnnnnnnnnnnnnnnnnnnnnnnnnnnnnnnnnnnnnnnnnnnnnnnnnnnnnnnnnnnnnnnnnnnnnnnnnnnnnnnnnnnnnnnnnnnnnnnnnnnnnnncatgatatgatgctcgatcttatcctgctgaattgtgaagacgagaattttctcactatagtggatggttcacaagacaatacaacacagaaatacaaggtccgtcggatgtctgttcgcttcaatgatgcaagtaatgggacattattactgaggaagtttagtttgtcacaggttcggtctattatgatctttggaagctctgagaatatacctcctcggtcaaaattcaagtgcctccgagttctttttatcaaggattaccgtatatcaatcgacctcactgggatgaacgaactgtatcagctaaaatatgtagagattaatggccctggtgatgatgtgcacctgccaacacagattagagagctccaacaattagaaacatttgacatatggtgctgtgccactgttccatcagatatagttcatctgccacacttattgtatctgagtattccacatcgtacagggctgcctgatgggattggcaaaatgaaatccctgagatctctttatgggtttgatttgtcagtaaactcatgagataaattcatggagcttggagagctggccaatacgagatatctaactctctccggccactttggtgaccatgatcaggtcgacattttggatgttctaaactcttctttgaaaaaacttggtagcctcgagttcgtgcacatatatacaaatggatgcatggatggattgtctcctccatgcagccttcaaatccttggcacaaacatcttaccagggccattgagttgttggttttccagggtgcctcactggacgagggaacttcttaacctccgtctgttgcgattcagagttgacgagctgctcacggacgatgttggtattgttgcgcagttgccctccctaaccgaccttgatttacatgtccgaagacccccaaaagaaaagattgtcatcaatggacgaggaacattccctgctctaaagcgctttagactcaccttgattaatgcatcataccttaccttccaggctggggcgatgcccatgctccagaggctcgctttctgggtcaaaggtcggaagcagaatggggctggaccagccggcatcaagcacttgccggcgcttgaagaggtgtttgcacatgtctgctacaatggtaatacagaatctgaaaaaagcagcgctgaatatgcctttaggagtgctgttgacaggcaccccaacaatcctcgcattgtagtccaacattattgttattttgattttttttacttgacaaaaaacttctgattggactccgcagcatgcagctggtaagtgcaagtttctgctaccattatcatataccctctatatctcttctttgttttgtagaacctcctctagccgtctatgatttttttttcgataaaggacttttcgttgaatagatatatgaaggtgatacaatcgtgttgaaagaaagcccagcctctgcatagctagatgcacacagccaaaaagtctagagcaccctaaaaataaaataattcgatacaatgccaatcaataaaacgtgtccatcctaagaaacggtagnnnnnnnnnnnnnnnnnnnnnnnnnnnnnnnnnnnnnnnnnnnnnnnnnnnnnnnnnnnnnnnnnnnnnnnnnnnnnnnnnnnnnnnnnnnnnnnnnnnnnnnnnnnnnnnnnnnnnnnnnnnnnnnnnnnnnnnnnnnnnnnnnnnnnnnnnnnnnnnnnnnnnnnnnnnnnnnnnnnnnnnnnnnnnnnnnnnnnnnnnnnnnnnnnnnnnnnnnnnnnnnnnnnnnnnnnnnnnnnnnnnnnnnnnnnnnnnnnnnnnnnnnnnnnnnnnnnnnnnnnnnnnnnnnnnnnnnnnnnnnnnnnnnnnnnnnnnnnnnnnnnnnnnnnnnnnnnnnnnnnnnnnnnnnnnnnnnnnnnnnnnnnnnnnnnnnnnnnnnnnnnnnnnnnnnnnnnnnnnnnnnnnnnnnnnnnnnnnnnnnnnnnnnnnnnnnnnnnnnnnnnnnnnnnnnnnnnnnnnnnnnnnnnnnnnnnnnnnnnnnnnnnnnnnnnnnnnnnnnnnnnnnnnnnnnnnnnnnnnnnnnnnnnnnnnattttctattatcaataggaacatcacaatggaccattgcatcatggatataccctctattataagaaaaaaaattctgcagtattgcaaatggagatttcagaactgagttgctgaattttttgcggcagcctgatttccaccacgagcttttttacggtaccctatactgctaggggtgagacgaccagtatagcaaaatctgagcgttgatttcgtgtgggtagggggttgttgacgggcgatgccaagctatttcgtagtaatagcagggaatcgacagggaaatacccaatggttcctgggacatctgtccccggaatctcaccactcatccgcaccgggctattagtatagttcctgttcttgttttgtattaaatctatctctgtaccagctcgtcgagtatttgattcctttcaacctgttccctggcgtgtgtcccgcaagcatttaaccagcaactgaccctcaactgtccctgacttgcaggagcaggtcgaaaccgtgtgggacgtgtttgtgtactttttgcagtccaccactgtttacttggggttagcctgatttgtttgctctagtcttactttccgtccatggtaaatgagacgtagatgtagtactaatttctgttcgtcaccgatgggtttggtgaaagtgtttgctttaacgatgatttactgttccctacgtagacgcgtgctgcagtcgaacatattgtaaatgtagtttcactttaacaaaaatttcctgcattttaaagctaatttcctgaaaatattactttttttcacccccccccccctcttttcaaaactgcggattttttttgactcataaaataataaagtactagatgataaagtttgttacaattcacccaaaaaagacatgaatgaatattctcccagtacaattaccaccaaaattctttgccgcggcgattactcaaagtcccgcctcctccaagctcattcttttagctagatcgttgggggcgcgctcttgtgccggaatactcgtgcattccgcgcattcatatggaccacgaaatcagcatggtgaaagaggccattcccatcctatcccgcgtgtgagcaccggtttgccttgcccaccaatcatccacatttgtcctctagatgccaaatggaggtgtcccaacttttcagctagaaattcccttgtaaccatgttccaaagccaaagagagcattgcatttatagaacaatagggggccacattcttgcaacctctcacaaaggagataaaaaatattgacaaagaagaaatctaatacccaaaaaaccagatttcattccccggaggccatcaaattccctgaaaaatttcaattcatagtcaacttgttctttcctcagtatttataccttttttttttctcggctctgttgatgtgcttatatactgaagttctccattatcactttatttactaaatatttcccttgtgatgcatatatactggcgaacaaaaagtatactccccgtcaaaagaaaataggctagaaaataaatatctattccctagtatggaataccatgtaataaaactgtcaacaggatacattccacgggcaaccacaannnnnnnnnnnnnnnnnnnnnnnnnnnnnnnnnnnnnnnnnnnnnnnnnnnnnnnnnnnnnnnnnnnnnnnnnnnnnnnnnnnnnnnnnnnnnnnnnnnnnnnnnnnnnnnnnnnnnnnnnnnnnnnnnnnnnnnnnnnnnnnnnnnnnnnnnnnnnnnnnnnnnnnnnnnnnnnnnnnnnnnnnnnnnnnnnnnnnnnnnnnnnnnnnnnnnnnnnnnnnnnnnnnnnnnnnnnnnnnnnnnnnnnnnnnnnnnnnnnnnnnnnnnnnnnnnnnnnnnnnnnnnnnnnnnnnnnnnnnnnnnnnnnnnnnnnnnnnnnnnnnnnnnnnnnnnnnnnnnnnnnnnnnnnnnnnnnnnnnnnnnnnnnnnnnnnnnnnnnnnnnnnnnnnnnnnnnnnnnnnnnnnnnnnnnnnnnnnnnnnnnnnnnnnnnnnnnnnnnnnnnnnnnnnnnnnngctttaaacaaaccattttgtcaaatttctttttctgtatagtctttaaaacaaaaactatggtcacgaacttactaatcttaaagtatgtacatagatctagtcgagcaaggcattgtaacattggatatttgagtctctattttttttttgaatatatatgaccacaaaaatttgaataacaatatttttttgtggaataactttcaagatattttttgtggaacaaaacaaattcaacannnnnnnnnnnnnnnnnnnnnnnnnnnnnnnnnnnnnnnnnnnnnnnnnnnnnnnnnnnnnnnnnnnnnnnnnnnnnnnnnnnnnnnnnnnnnnnnnnnnnnnnnnnnnnnnnnnnnnnnnnnnnnnnnnnnnnnnnnnnnnnnnnnnnnnnnnnnnnngagcatttatattaccaccgaaacggacgacgccccgcatttccggtcgaccacttgtagttcctctaattaaattagatgcgctcttagccacattgcgactatatttataaaattgcatgtccaccgaatttacatacctatcattttttttaaaccttagcttcatgaactgcactaaaaaaacacaatttgtaactaacttcttttgtacaagtcaaaattatttcttaacatttttttaattattacatgctatccgttgcacaaagcatcagattagatttttcccagcgttgcataattacatttattatgcataaatatttaataatttgcatttttctccaaaacagtgcaaaacttggcaatgtaattatttggtacgagtcgcagatacatattaatcgcgcactaacacaaacaacgttgaccagaggacacagacaaagacctcccttttgcacacaacaagtgccgtgttgcagcacgaatgcatttatgcatgcaagctggaagacgcgtcgttcgttcccaaagatcctgtacgcacctgttccagttctggtacaccactgttccttcgctgtatactcctctttaacactttcacaacagaccgtatatgctgcaccactaacttatctgtcaatcacgacgcatgaactgacgcggtggatatcggggacacgtgtccccatagaccaaacgctcgcctccggaatcgacatcccttgctcgctcccattgccgccatggcagagttgagatcgctcccacgccactgccgccacgccgtagtcgatcttgctgccgcatactgtgaccagcacccatgagacaggctggcaccaccaccaggtcttttttcaacgtctctgccgctccttgacctcgcttcgaccgccaccatgctctagctgaccttgctgccgtgtactgaaaccgggccgtgcgctcatctaccttggcgtctcgtccccatttgtctcgccacggcgctcagccccatcacatacatacatacatggaccaagacatggcggccatgactccattctgcccaagcaccatggccgagacgacgagcttctgtacactcatgactctgcgtcgacggacaacagcgccaagtggtttcttcgccaccgttgtgaaccaggacgaaacgagcacggtttggaggtatgctcagccatggaaggggcacagggcaacgcctcattgttgtcggacctaatcgagaaggaggcttggcggtggccgccagaactctaccagcgtcggtgcaccagaacaatgagctgggtgggtcgagggcgtggtgggtcgtagaaatcccaaaatgccctcagaatatgtataccgctgggcaagaacgagcagtgctatctatactgctcgccatgctgctggctttactgaagcggtacagatcgggcatggccgttggatttcacggatgaaaggtctatattcactacagggcaccataaaagagttcaccaccaaaatgtgtttgaaatttagtattgctaggaattgcccttatggaaggaatctaaataggtgtatacacaacttcacatttctgacccaattttaacataagacactacatttaaatggtttgaagaaaggttattttcatggtcacaacgaagaatagtgagttttatgttttgctaatcaagtattcaacatcagatttttcttttattccattgttgccaatagaacatctatataaattgtatatgcatgcgctattctattgaggtattctcttctagcttgtgtgatgcatagcttaccgtgttattgttactttaatgtgagaactgaacaagcatatggcttctgaactacctcacctgcgtaatttcagagttttgacctgtctgcatgatattggtttgcaggctattaagtggatcgatgtcaatatctgttaattgggatgctttgtcaggacaacaacggaatgctgcaggtagactgctgtttctgccagcaacaagattgagctacaagtcttcgcttcctttgccacctaattccactaccctttgtgaacattcagttcattatctcagagttgcgttctgttaccactctgagatgatgatcacacttttattatgcttgtaacaaggattggtgttgagcagtagtttgcactgatagatggtgctctgctcctctggattatcttgttcttgtatattggtgtgcttactttgtattgaactgaacgtttcctgtctcaatattcgagaaaaaaaattaataagacgattgattgaagatgtatggtaatttgcttagtttcactgtaaattcggtaagaaatgttgtttcactcattttattggaggttttggcacaagccctgcattacaaggcaccctgaacatcatatgcttgtgatttccgactctggtttcagctggtatcacatccagtgtgcttgcttagtttctagttgatgcattttttttatgagctagtctctccctggtcgagccaaccacacctccgcccggtcatgtgccagttagtcttacttagctcagttcattgaactgtttctcctttgtgaatctgattcatccacattccatcaaactgtttattctcctttatcaatctgatacatcatctctcggtgtttcctcttgaagatgatggccacactttaataattgaggcttggttgtggagacgagnnnnnnnnnnnnnnnnnnnnnnnnnnnnnnnnnnnnnnnnnnnnnnnnnnnnnnnnnnnnnnnnnnnnnnnnnnnnnnnnnnnnnnnnnnnnnnnnnnnnnnctgatcgatccacccgcagtgtaaagctagcctcaactagctaatcgatctaccaaatcaagtttgctcggttgagcttctgacttgattaattcaccgctagccaaagctaaacacgcacgtacacaaagcctaatcnnnnnnnnnnnnnnnnnnnnnnnnnnnnnnnnnnnnnnnnnnnnnnnnnnnnnnnnnnnnnnnnnnnnnnnnnnnnnnnnnnnnnnnnnnnnnnnnnnnnnnnnnnnnnnnnnnnnnnnnnnnnnnnnnnnnnnnnnnnnnnnnnnnnnnnnnnnnnnnnnnnnnnnnnnnnnnnnnnnnnnnnnnnnnnnnnnnnnnnnnnnnnnnnnnnnnnnnnnnnnnnnnnnnnnnnnnnnnnnnnnnnnnnnnnnnnnnnnnnnnnnnnnnnnnnnnnnnnnnnnnnnnnnnnnnnnnnnnnnnnnnnnnnnnnnnnnnnnnnnnnnnnnnnnnnnnnnnnnnnnnnnnnnnnnnnnnnnnnnnnnnnnnnnnnnnnnnnnnnnnnnnnnnnnnnnnnnnnnnnnnnnnnnnnnnnnnnnnnnnnnnnnnnnnnnnnnnnnnnnnnnnnnnnnnnnnnnnnnnnnnnnnnnnnnnnnnnnnnnnnnnnnnnnnnnnnnnnnnnnnnnnnnnnnnnnnnnnnnnnnnnnnnnnnnnnnnnnnnnnnnnnnnnnnnnnnnnnnnnnnnnnnnnnnnnnnnnnnnnnnnnnnnnnnnnnnnnnnnnnnnnnnnnnnnnnnnnnnnnnnnnnnnnnnnnnnnnnnnnnnnnnnnnnnnnnnnnnnnnnnnnnnnnnnnnnnnnnnnnnnnnnnnnnnnnnnnnnnnnnnnnnnnnnnnnnnnnnnnnnnnnnnnnnnnnnnnnnnnnnnnnnnnnnnnnnnnnnnnnnnnnnnnnnnnnnnnnnnnnnnnnnnnnnnnnnnnnnnnnnnnnnnnnnnnnnnnnnnnnnnnnnnnnnnnnnnnnnnnnnnnnnnnnnnnnnnnnnnnnnnnnnnnnnnnnnnnnnnnnnnnnnnnnnnnnnnnnnnnnnnnnnnnnnnnnnnnnnnnnnnnnnnnnnnnnnnnnnnnnnnnnnnnnnnnnnnnnnnnnnnnnnnnnnnnnnnnnnnnnnnnnnnnnnnnnnnnnnnnnnnnnnnnnnnnnnnnnnnnnnnnnnnnnnnnnnnnnnnnnnnnnnnnnnnnnnnnnnnnnnnnnnnnnnnnnnnnnnnnnnnnnnnnnnnnnnnnnnnnnnnnnnnnnnnnnnnnnnnnnnnnnnnnnnnnnnnnnnnnnnnnnnnnnnnnnnnnnnnnnnnnnnnnnnnnnnnnnnnnnnnnnnnnnnnnnnnnnnnnnnnnnnnnnnnnnnnnnnnnnnnnnnnnnnnnnnnnnnnnnnnnnnnnnnnnnnnnnnnnnnnnnnnnnnnnnnnnnnnnnnnnnnnnnnnnnnnnnnnnnnnnnnnnnnnnnnnnnnnnnnnnnnnnnnnnnnnnnnnnnnnnnnnnnnnnnnnnnnnnnnnnnnnnnnnnnnnnnnnnnnnnnnnnnnnnnnnnnnnnnnnnnnnnnnnnnnnnnnnnnnnnnnnnnnnnnnnnnnnnnnnnnnnnnnnnnnnnnnnnnnnnnnnnnnnnnnnnnnnnnnnnnnnnnnnnnnnnnnnnnnnnnnnnnnnnnnnnnnnnnnnnnnnnnnnnnnnnnnnnnnnnnnnnnnnnnnnnnnnnnnnnnnnnnnnnnnnnnnnnnnnnnnnnnnnnnnnnnnnnnnnnnnnnnnnnnnnnnnnnnnnnnnnncgtccgaaaagttttctccggatgtatgtcgaacaccggtccgagatgcataggtgtagatggtggcgtcattttctcatgtgctttgagagacgatgcaggtgccaacatggctgcctttcctgcatacaagcatgcacacgacggagctcttgatgcatgctcatcgtttgcacgtgacaatgcatgctcatcatttgcatgtgagaatgcatgcatgccctttggcgggccttgtagcctgcatagactgctgctgcctaggcagccaatgcctacaaccaatgagccaagcccactgccttctttcccgggcatgaccctgcgtgagccttgcgcgcttgtgcctccaagccgagcacaatataatgtgccgctgctgctctctgctgtgtgcaaggcatcgctactccgtgcgagacctcctgctcgagtttctgcggcaagtgcttttggcctactcagcgggnnnnnnnnnnnnnnnnnnnnnnnnnnnnnnnnnnnnnnnnnnnnnnnnnnnnnnnnnnnnnnnnnnnnnnnnnnnnnnnnnnnnnnnnnnnnnnnnnnnnnnnnnnnnnnnnnnnnnnnnnnnnnnnnnnnnnnnnnnnnnnnnnnnnnnnnnnnnnnnnnnnnnnnnnnnnnnnnnnnnnnnnnnnnnnnnnnnnnnnnnnnnnnnnnnnnnnnnnnnnnnnnnnnnnnnnnnnnnnnnnnnnnnnnnnnnnnnnnnnnnnnnnnnnnnnnnnnnnnnnnnnnnnnnnnnnnnnnnnnnnnnnnnnnnnnnnnnnnnnnnnnnnnnnnnnnnnnnnnnnnnnnnnnnnnnnnnnnnnnnnnnnnnnnnnnnnnnnnnnnnnnnnnnnnnnnnnnnnnnnnnnnnnnnnnnnnnnnnnnnnnnnnnnnnnnnnnnnnnnnnnnnnnnnnnnnnnnnnnnnnnnnnnnnnnnnnnnnnnnnnnnnnnnnnnnnnnnnnnnnnnnnnnnnnnnnnnnnnnnnnnnnnnnnnnnnnnnnnnnnnnnnnnnnnnnnnnnnnnnnnnnnnnnnnnnnnnnnnnnnnnnnnnnnnnnnnnnnnnnnnnnnnnnnnnnnnnnnnnnnnnnnnnnnnnnnnnnnnnnnnnnnnnnnnnnnnnnnnnnnnnnnnnnnnnnnnnnnnnnnnnnnnnnnnnnnnnnnnnnnnnnnnnnnnnnnnnnnnnnnnnnnnnnnnnnnnnnnnnnnnnnnnnnnnnnnnnnnnnnnnnnnnnnnnnnnnnnnnnnnnnnnnnnnnnnnnnnnnnnnnnnnnnnnnnnnnnnnnnnnnnnnnnnnnnnnnnnnnnnnnnnnnnnnnnnnnnnnnnnnnnnnnnnnnnnnnnnnnnnnnnnnnnnnnnnnnnnnnnnnnnnnnnnnnnnnnnnnnnnnnnnnnnnnnnnnnnnnnnnnnnnnnnnnnnnnnnnnnnnnnnnnnnnnnnnnnnnnnnnnnnnnnnnnnnnnnnnnnnnnnnnnnnnnnnnnnnnnnnnnnnnnnnnnnnnnnnnnnnnnnnnnnnnnnnnnnnnnnnnnnnnnnnnnnnnnnnnnnnnnnnnnnnnnnnnnnnnnnnnnnnnnnnnnnnnnnnnnnnnnnnnnnnnnnnnnnnnnnnnnnnnnnnnnnnnnnnnnnnnnnnnnnnnnnnnnnnnnnnnnnnnnnnnnnnnnnnnnnnnnnnnnnnnnnnnnnnnnnnnnnnnnnnnnnnnnnnnnnnnnnnnnnnnnnnnnnnnnnnnnnnnnnnnnnnnnnnnnnnnnnnnnnnnnnnnnnnnnnnnnnnnnnnnnnnnnnnnnnnnnnnnnnnnnnnnnnnnnnnnnnnnnnnnnnnnnnnnnnnnggcttgtgttagtgtttaattccaacagtgcctcggtcctacctcccattttgtccaagtgttcggtctcctctgtttttgggtgttgtttgctgtttactctgcttcaggagttggagtatcacacccaacctgtccgaccaattgactnnnnnnnnnnnnnnnnnnnnnnnnnnnnnnnnnnnnnnnnnnnnnnnnnnnnnnnnnnnnnnnnnnnnnnnnnnnnnnnnnnnnnnnnnnnnnnnnnnnnnnnnnnnnnnnnnnnnnnnnnnnnnnnnnnnnnncttggcgagatcaagtttgccgtggtgtccactccaccctcatagtgatggctgagggggctctgtcactacgtcggcctgaacttttcattgacggtaacaggaaaagacatcatacaatgtttcaatacaaagatgacagaaaagaaagtgaacagggaaacaagcggctagatgaaacaacattgtgctccagtctcgaagaagagcctagcggactagcttattacaacagggccagcctgtggagggtcctcaattatgatatgcttaattattgtgtttgtcaaaatttgatctatgttggttaatccttctatgacgaaatcaacttgtctttttctcttcagagaaaacttgttattttgattgcctatgtgtgtttcggctaaagggaaagcccagagtagtgagactcggtggaatgcataaccactaccaaaatatattcagcccataactaacattagctcatactttttcgacaaaggatggattttattagcttaaaatggagcatcaagtgatacaaacacagtgagcacacatccggcctctgtatagctaggatgcacgcaaccaaccccaactcacacaaaatgaaaacacaccaacaactagcaaagccaaacatgaccaaagctatgccttagtggagcaaaaagaaaaaggaaaactccgaagcaatcaccagcgatcacaatctacaacagcaaccatatccggcaactacatgcatagcgtggtcttgacgtgaggtgacatgcaagtgaaggccatgctcacacaagcagacagtcaagccacgacaagagccactcgccgccagcaactccgagtagtgaaggtcgtcgtcgcactttgcaacggagatcgagggaggatgatcaccgacactgtcaaatcccaaattaggacgctccaacagtctcgcatcgtcctcatgcttcaccatcctcatccatggctacagaatcaggcaactaaacaaattctccgttgctatcggatttgaagatccaagattccggccctgtcttggcaatcacctagcagcacatgaccacgcgtttgcctacatgcccgagcggagaaccgccataccgtgacgtaacaggccgacgcagtcgcctgcagatgggatcgtggtcgccgacgtctcacaaccagagactgccgccaagctagaaatccaccgccactgttgcacatccatgtcctctgcatcaagctgccatccatagatctcactccagagcaacactgaacaagctacctcaggccttggtgatcaagtcagctccaaaacaatgccttaagaaggtcaacgacgaagaaatcgccgccattgtctgtgccatgagggagtaaggatttcctcggagcaaagaccacaaggggaggaagggagcaagcaacgccttcaacaaggattatggcacgcagaagtgtccttgtcaccactcctggcactaaaccaagacagggtttccccaacttccctcacaccctccccttcgcataaaccaccatgaacaaagccatcttgtccagcgcaccggcgagagtaggagaggccacaagagcaaaggctcaaagaaccatctgccatccctgagcgctgccataggtgagtatgcgccattcagatcagtttctgccccgtgcgccatcggcctggctagcgcccatcccgccatccacgcccggcatggccacacatggcgcacaaccgtgcactagcagccgcgccccaccaccccttgccgagcttcgccgccgcgcagctgacgcaaggcacgtacgcgcccggagcactaccagatcccactgagaaccgccgcccacaaacccaggggagacacaaggagaagccccaccgccgccgtcggccccacggtcttcgcccggcggcatttccagcaacggcgctgggagtatggaagtctcgcggcggcgcgctagggtttgaggagtcgccccctagccgcctcgagcgaagacaacgcgggggagtttttttttctagaaggccgagttccgctaggaaatagaccttccacattagcttatacgaacgccaaaatatattcagcccctgattaggtgtaaaaggaagctttgaggctggtacgnnnnnnnnnnnnnnnnnnnnnnnnnnnnnnnnnnnnnnnnnnnnnnnnnnnnnnnnnnnnnnnnnnnnnnnnnnnnnnnnnnnnnnnnnnnnnnnnnnnnnnnnnncatttcttgcctaaaagcagacatcgatgaatgttcgtgtttgaagtggatatagtgttgcaatctcccacagacaaaaaaaaatgtaagtgatattagtttgttctaacatttgttctgattttgttttagtataataacaaccgatgcccggtatgaacgcggtacggagacatcagcgcatcgtagcgtgcgagacacttttagtaaatgagatgagaccacctgttccgtgctcaatccactttatagtgagcaatcgcgcaccttctagattaccgagtaaaacaaagggacaacaaaagagctccataaagacgagtggtagtaccatacaatcctccatatactcgacctagcattcaccatataaacttacctagtattgctactcgagatacagctttttgctggtattgaaaagctataaagttatgggtataggaaatacagaggagctagctagaggcctggatatgagttggcagaagaagaagaaaatttgtgaaactagaaaagcatttgggagtaggaggcatcaggtaaatgataaccattcatcagtgagaaccatacgctcgacgatccaccggaaagctccaactccagattttcggggcaaggcggtggggatgagcacaaagctcacgtgcttatcccacttctctgttggatgactcaggatttacgagctactcattcacaatggccaggtgctgtagaactctcgcccggattggaagcccccacatagataaactccgcattgcacgtgacgtatcaagccgcacatggagtccacacgattggaatcctcctcatcgtccgagtcgctgggcgcccgattgagatggagccgcagggcgctctacttctcatgatcaagtgcttgtattattgatgtgattttctggaacttcgtccaatgttttttcatgttctgaccgtcaccggacaatcttttctacttcagagatcatgatcacgcttgattctgctagtgttaaggcttcgtgctaggcaaaagtttgcagatagatggtgctaagctccttccttgcagataattatatcattttaatatattttggcgtgcttactgtgtattgaactgaacgttccctgtttgatgattcaagataaaacttagggaaagaacaatagggatcattggatgtgttgtaatttgatctgtaccattgttactttgtgatgaaatatgttgtttcacgcatgttattggaggttgtatcaactgccctgcattacaagggcctcaatgcagcagctatccgaatagctacacggggttcaagttttggcctaaattgcacggtattttgcagccctgagacacaccatgcaggcacatatatctcatgtccttgtggtttcagctggtgtttttccgatttgtaaaaggcagtatgaaaaccatagcgcaagaaatgcagtagtaagcaaatcgaaactgagtgttggtgtgcccttcagtgtgattgcagctggttacagtggcctctcttcatatgaatctcgtgagcctcctgcactgcactccaccttgtctcattgaggaactattttggggtaattcagggatgcaacttcagtgacgtgtccagtctgtaatccaatgaaagcttgtggtcaactaatatgccaacactgtatgccagtgagcatgaccaattggtgaagcaactgctgattaagaactgtttgactcttaattttagatttttattgtgttattaaaatctgatcaattagtggttgatccttgtgttgtgaatgttgacttgtgcttgcaattgtacattcttgggcaagctcacaatggtgtgctaatatgtaatgcatataatatttctcaataaacggtttgcattagccattactaacaccaaaatatattcaacacttgattacttgtactacagacaaaattcaacttacaaaaccttcaccgaacgatcatctatatgtaaggactggtaggtcttaactggtgagacaactcaaaccactccaacgcacatcgcaatggacttgtcatccctcttcaacattgccaagagacaagagtatataaaactttccatttcttcttggcacagcttgggcaaccattcctataaatggcggtaaagcaatggcataattccaaccacttagtgtacaacacaggtctaaatttataaatgacggtgaaacaatggcataattccaatagtgcaccttctagatcgccgagtaaaacaaaaggacaaccagagctccataaaaaggtggtaaggcaatggtataattccaaccacttagcgtacagaacaggtctacatttataaatgatgatgaaacaatggctcaactaacttccacagaaactagtagctttaccataaatttctgtctatgaactcagccacaactcaccaaaatgaaagcaacctagttcttctaattgagtcctactattttgctagtatcaaaaagttgtagataggaaatacaaaggagctagtggccgagtgtagatgagaaaagaagagaaaatatcatgaactataagagtttgggagtaggagtcatcggggacacgaggagcaaacttccatctcaacaacctagagctagaagacaacaccgatgcccggaggtacaagatagaggatgcacatttggtagctgcaccgatattgtcgctgaggagaggagtcgagccaacacagagccaaaggagaacgatggagggggtcgctccatccatcgactcggtcaatcacggccgattactttgttgcactctggttttgtgctctttgattttgttttgatactgtagcttggaaagaaagaactaagaataacctcacttcactcaaattcaaatccctcctaatcttattcatcacattactagcattgtatattccttatagtagctatgtgaggtacaccctctggggtgtcnnnnnnnnnnnnnnnnnnnnnnnnnnnnnnnnnnnnnnnnnnnnnnnnnnnnnnnnnnnnnnnnnnnnnnnnnnnnnnnnnnnnnnnnnnnnnnnnnnnnnnnnnnnnnnnnnnnnnnnnnnnnnnnnnnnnnnnnnnnnnnnnnnnnnnnnnnnnnnnnnnnnnnnnnnnnnnnnnnnnnnnnnnnnnnnnnnnnnnnnnnnnnnnnnnnnnnnnnnnnnnnnnnnnnnnnnnnnnnnnnnnnnnnnnnnnnnnnnnnnnnnnnnnnnnnnnnnnnnnnnnnnnnnnnnnnnnnnnnnnnnnnnnnnnnnnnnnnnnnnnnnnnnnnnnnnnnnnnnnnnnnnnnnnnnnnnnnnnnnnnnnnnnnnnnnnnnnnnnnnnnnnnnnnnnnnnnnnnnnnnnnnnnnnnnnnnnnnnnnnnnnnnnnnnnnnnnnnnnnnnnnnnnnnnnnnnnnnnnnnnnnnnnnnnnnnnnnnnnnnnnnnnnnnnnnnnnnnnnnnnnnnnnnnnnnnnnnnnnnnnnnnnnnnnnnnnnnnnnnnnnnnnnnnnnnnnnnnnnnnnnnnnnnnnnnnnnnnnnnnnnnnnnnnnnnnnnnnnnnnnnnnnnnnnnnnnnnnnnnnnnnnnnnnnnnnnnnnnnnnnnnnnnnnnnnnnnnnnnnnnnnnnnnnnnnnnnnnnnnnnnnnnnnnnnnnnnnnnnnnnnnnnnnnnnnnnnnnnnnnnnnnnnnnnnnnnnnnnnnnnnnnnnnnnnnnnnnnnnnnnnnnnnnnnnnnnnnnnnnnnnnnnnnnnnnnnnnnnnnnnnnnnnnnnnnnnnnnnnnnnnnnnnnnnnnnnnnnnnnnnnnnnnnnnnnnnnnnnnnnnnnnnnnnnnnnnnnnnnnnnnnnnnnnnnnnnnnnnnnnnnnnnnnnnnnnnnnnnnnnnnnnnnnnnnnnnnnnnnnnnnnnnnnnnnnnnnnnnnnnnnnnnnnnnnnnnnnnnnnnnnnnnnnnnnnnnnnnnnnnnnnnnnnnnnnnnnnnnnnnnnnnnnnnnnnnnnnnnnnnnnnnnnnnnnnnnnnnnnnnnnnnnnnnnnnnnnnnnnnnnnnnnnnnnnnnnnnnnnnnnnnnnnnnnnnnnnnnnnnnnnnnnnnnnnnnnnnnnnnnnnnnnnnnnnnnnnnnnnnnnnnnnnnnnnnnnnnnnnnnnnnnnnnnnnnnnnnnnnnnnnnnnnnnnnnnnnnnnnnnnnnnnnnnnnnnnnnnnnnnnnnnnnnnnnnnnnnnnnnnnnnnnnnnnnnnnnnnnnnnnnnnnnnnnnnnnnnnnnnnnnnnnnnnnnnnnnnnnnnnnnnnnnnnnnnnnnnnnnnnnnnnnnnnnnnnnnnnnnnnnnnnnnnnnnnnnnnnnnnnnnnnnnnnnnnnnnnnnnnnnnnnnnnnnnnnnnnnnnnnnnnnnnnnnnnnnnnnnnnnnnnnnnnnnnnnnnnnnnnnnnnnnnnnnnnnnnnnnnnnnnnnnnnnnnnnnnnnnnnnnnnnnnnnnnnnnnnnnnnnnnnnnnnnnnnnnnnnnnnnnnnnnnnnnnnnnnnnnnnnnnnnnnnnnnnnnnnnnnnnnnnnnnnnnnnnnnnnnnnnnnnnnnnnnnnnnnnnnnnnnnnnnnnnnnnnnnnnnnnnnnnnnnnnnnnnnnnnnnnnnnnnnnnnnnnnnnnnnnnnnnnnnnnnnnnnnnnnnnnnnnnnnnnnnnnnnnnnnnnnnnnnnnnnnnnnnnnnnnnnnnnnnnnnnnnnnnnnnnnnnnnnnnnnnnnnnnnnnnnnnnnnnnnnnnnnnnnnnnnnnnnnnnnnnnnnnnnnnnnnnnnnnnnnnnnnnnnnnnnnnnnnnnnnnnnnnnnnnnnnnnnnnnnnnnnnnnnnnnnnnnnnnnnnnnnnnnnnnnnnnnnnnnnnnnnnnnnnnnnnnnnnnnnnnnnnnnnnnnnnnnnnnnnnnnnnnnnnnnnnnnnnnnnnnnnnnnnnnnnnnnnnnnnnnnnnnnnnnnnnnnnnnnnnnnnnnnnnnnnnnnnnnnnnnnnnnnnnnnnnnnnnnnnnnnnnnnnnnnnnnnnnnnnnnnnnnnnnnnnnnnnnnnnnnnnnnnnnnnnnnnnnnnnnnnnnnnnnnnnnnnnnnnnnnnnnnnnnnnnnnnnnnnnnnnnnnnnnnnnnnnnnnnnnnnnnnnnnnnnnnnnnnnnnnnnnnnnnnnnnnnnnnnnnnnnnnnnnnnnnnnnnnnnnnnnnnnnnnnnnnnnnnnnnnnnnnnnnnnnnnnnnnnnnnnnnnnnnnnnnnnnnnnnnnnnnnnnnnnnnnnnnnnnnnnnnnnnnnnnnnnnnnnnnnnnnnnnnnnnnnnnnnnnnnnnnnnnnnnnnnnnnnnnnnnnnnnnnnnnnnnnnnnnnnnnnnnnnnnnnnnnnnnnnnnnnnnnnnnnnnnnnnnnnnnnnnnnnnnnnnnnnnnnnnnnnnnnnnnnnnnnnnnnnnnnnnnnnnnnnnnnnnnnnnnnnnnnnnnnnnnnnnnnnnnnnnnnnnnnnnnnnnnnnnnnnnnnnnnnnnnnnnnnnnnnnnnnnnnnnnnnnnnnnnnnnnnnnnnnnnnnnnnnnnnnnnnnnnnnnnnnnnnnnnnnnnnnnnnnnnnnnnnnnnnnnnnnnnnnnnnnnnnnnnnnnnnnggcacaact

SEQ ID NO: 18 - DNA, 23698 bp, Artificial Sequence
  Scaffold 1935712
ccccccccccccccccccgccctactaccggttcggctcgaaccggcgctaaaatgcaaccacgtggcacgagccaggcccgggtgctggtagaccattacccgtgtaggcacatttgtcttttttgtttctctcaaaagaaacaacgtataaacttcaaactttgtaggacaataaaacattctaattactatgtgggcaaaaactttcatattttttcatgcatttaaaatgctaaaatttattttttaataaaaaaatcctcattttgtatatttatgttggtccaaaaaatctgaaagttttttcacacattgaagttgtaaagtttgtttgatctgcaaagtttgaagtccatatgttctttcatttgagagaaacaaaaaagagaaatctgcttgttgcaagttagttgacgagtacggatctcaaagcaatgttcaagggctgaagataagaggttccatgtaggacgagctacaaaggaactttgtgttttagaatgtatggaaagtctactgtacatgccacaagcagcactgtcaagtatatcaaatagaataacatgaagagttcatgataagaagcacagcgtagtattacaaaaataacacgacagacaagttcataaacataggcgatacacgcattattaataagggttgccggcaataaggatagatacaagctcatatacaaaagcattattcatgataagcatgtcttgtcctttccacctgagcaagcaggcagcttgtaaaccaaccggatttgcttgttttttgaaataagaaagagaggaagatagagtttatgttgacagacaactgtagacaacgatgccaccatgtaccaaatactgtagataatggaaagggaagtgcagttgaaggaagcaatggcctatacctgccaacatgaagaaatggataaagcttccattatctaacaagaggaagaaatggagggaaagttacatcagtataagcgtgaggaagtttgtatcgcggaggagtgtggctgaaacgtactcttagtggcgacgaagctagcaggattcttcgatttcaggaccaactatcgttttgtccataccttgctgtttctttattagtaggccaaaaccaggtcgacaggaacttgaatctagatgatgcgtgttcaccctcctgaccacttctcataacctcagagtcgccattgtcagaaagcttgatcagattaccatggctggcaacctgttctctcatggcaccagctgccttcttgatactgccactgcttgcatggtgtgaagtgtaccggagggtaatcttctcaagcctgcgtaggttgatgatacctgaaggaaatttatgagctgggcaggcatagagcttcaggtggaggtgttttagtttcggcatagctccctgctcaaaggtgatccatggcacataacagtcgaaattgaaaacctcaacgctccggaaacctgcaggaattgtttgttcctctttcttcctaaaaatgcaaatgagtgcaagagtactcagagacggcagacctccaagtatcttaagatcatcttgatctagcttgcagactctgatatccagcttcctcagagtggtaagctctgcaagccaccggggaactttcgcaaaccttcctgccactttcaatctctcaagtgaaagaaaattggtggataaaggaagttcgtcgcttgggatgtaatcaccataaataatcagatattcaagattcgcacacttgcctatggaagacagcaacttatcatttcggtccttgtcggaaggttgatcatacaacactacctctagctcccttactcctgtcagtccactgatctcctgcatggcactttccgaccattctcttgaatcaacagtgccaagcgccttcactgagttcaactggtcacttcccacaggcaactttactctttggccggaactagaatgaccaaaataaagatgtgctagtttgggaagacgaacaatttcctttggcagctctttcacttgtgtctgtcttacatctaaggtctccagattttgcaattttccaatttctgcagggagacaactgagtttcgtctgccttgcatctagagtcttcagctgttgcagtttcccgatttctggtgggagattactgatttcagtctgccttaaatccagagtctccagatagtgcaatcccccaatttctggagggatcttcctgactggagtatgctggagactcaggtacttcaacaaggtcattcggcatatatggtccatagccgagttttccaaatccttgcagccatctagatctaacacccgtagatacaccaaatcattctgtaaaagaaacttggcagggccagcaatagtcatggaacgaatattgccatcaggattcatcgctgctgtgtcaattgaaagttctgaaccagaagaacattggactgacaaacggaaataatgatcatattcccttgaaataccaacgtcagacaagacagtagcaaatttttctttttttgatatctgcctaagagcacgaagcaccatttggttaacttcatacatctcttcccttgaatagttatcatattctgacagccggatgaaatttctgttgatgagctcatcaaagtacccgcttgctacttcctctcgactgtgcctcactttttcagagataaatccttcggcaatccatttcctaaccatactagtcctatgaattatttggttcttagcatgaacagccaagtacagcaaacagtccttgagagcgctgggaaggtgggcgtagatacgtgatataatctctctgaagagttctgaaccagcaatgttctcggattcagaacctaaagaacgtggcgtctgcttccaagaaaaatatacagaatacatcatctctggccatggctttgttggggttactttggttgcgagtaacgaagcaatacttattattgctgaaggcgtaccactgcacatcttcaagatcacaaacaaaaaaaggtctccaggttcaataggccaacgactgtccccatggcgattataatgctctatgaacaactttctggatttttcgtatccaagataatgaacttcatatatcgactcgtcacagcctgagcaacataacttagctatgtcattaacacgagtagtagtaattactcggctaccatagccattatttggcaagatagatgagatgctatgccaatcatcttcgttccataaatcatcaattacgatcaggtacctatcaaagtttgacaatgaaaagtcaactagagtaaggattaataataatctttgctattattagcataaaagtaatcaaatagggcagtgatatataatatgcatgagacagtaatcatgacgacttaagtgtggctgcaatcacaaggcaacaaaatcaaagagattgctagagtatgggtacctattgagtctagcctgtttgtaaaattgatattccctctgatccaaattaattgacgctctcttagtacaacttcgtactaaaaaaactaaatagttatagctatgtaaataatgagtgcaatgcaactgcatgcgtttgatcacaaactatgactacacacctatgtgcatccgcaaggccctatatatacagattgagccatctaagaaaacagagtgtttcaagaaaatagttggtgctcacattgtcgtatctaacaaatcaaatttaaacagagctaccaaattgcaatgaggtataacaattaaaacacatgtattttgtatcttcttcatgcattgataaaattcatattgtctacaagaaaagaaaagaaaagaaaagaaaaaacatgctcattaatgtatccatacctcctgttcagaagaaattttctaattagagaatcaagctgtctatcatcctttgcttctacattagcgttcctatgattttccacatcagtaagttgatggagcatctccttgaaaaacctcaccatgtcagctggtttaagggggaccctaacaaaagcaccacaatcaaactgcggtttaagccgatggtacacaacttgggcaagagttgtcttgcccaatcccccaagaccgacaatggagactgttttctttggcttcattgaaatgacatcatctccctctgtcagcatcttgattaacacatctcttggttcgtcgatgcagataacgacctctttctcttgctcatgtttgtgcagagccggtaggcaagcgtcgggatgtgtatgtgtggcaaacacgtccatgacacccactgttatctctttgatatgggcaatcagatcagtaggatccggatgaggagtcggtgaatctctggtccttccgaggagccgcctggagacacccaggttagcggctgccttagagcactcattaggcgtcaacaaggagtcgacgatgttgtcagtcttgcagaatgcctcgctgattttggataaccaacccctatcaaacttatcgagctggtccggcggcgcatccgtcatactgcagaagtaagcttgcaagcgcttctgctgttgtgccacatacttgaggtctttcttggcgccggagggcagattgtactcctccttgagtagtttgcccaggttggagaggacggagcccatgagccccgccgtgatatccatgctagctcggtccctcccctcccacttacggtctctggtggtggtaggtggatgatctagctagctgctagctagtttgtggaggtgacagtggatgcccagagttggctgccctccctcttgcatagcagcgagtctggatcggcaatgtggtgaagaagaaataggtggtgcggatggcaagaagcctatggaaattcctcccaagacgttccaaggagaggctagattaatggagaattttcgcttaatttctcccaatggaagctgcaagttaaaatcacaagggaatgatgatgagcatattatgattcagcacgagcatagagaagacgagtagatttcagtttgcaggtaggaataggataggaataggatacaaaggaaggggaaatccaaaacgaagctgcatgcatgtggtggtcggtcggacttacagttacagcgtggtcgactggtccgagaggagaggacaccggctgacagagacgtggcgagctgggaggcacgtacgcggtgcttccgggcgaggggaggctcgacggcgtgcttgagtgggtttgtatgtggctggggcgagagggagggagggagggagtcgacggcgtggaggtctgatggggagtggggaactgtactggcgggcgggggcttcaggtgtcgacccatttttcggtggggtcctcctcatctcctctacattgcgatggaaacatgagcaaatttattttatatgtgttacacaaaatataggagaaactcgtacgggaacgcatgcagtgcgtgtttactcctgcaaacttacatttttctcatctcaaaattccagtttctctcggccacgagtagcaagtttcagagttgaaactttaagggtttttttttgcctgtcgcaggtactaagattcatgatttgaaattttaagcagttatttttgcccgtcacaggtactaattaaacacaaccaatgatatgaacagtatattaatggcgccatatacaaaggaagaagtcaaaaaagccctgttccaaataggagacatgaaggctccgggaccagatgggctacatgccatcttttttaaacgtttctggtatattgtaggtgatgagctgacaaaagaagttcttgatgcgataatcaacaaaaaaattcctgaaggttggaattccaaaaatgttgtactcatcccaaaggtggacagcccggaggtagtcactcagtatagacctatcagcttatgcaatgtggtctacaaaactatttcaaagatgctagcaaacagactcaaaaagattttgcccgaggtaatctccccaaatcagtcggcatttgttccggggagattaattacagacaatgttctagtagcttatgagtgctttcatgcaataaaaaggaagacccatggatctaatggtgtttgtgcagttaaactggatatgctcaaagcatatgatcgtgtagaatggggcttcctacaaagaatgatgttgaaactaggctttgacccatcttgggtggagctgattatggagtgcgtttcttcggtgagctacagaatcaggttcaatgacacagagacggaagagttcatacctacgagggggcttaggcagggggatccgctatccccttatctatttttgttatgctctgaaggtttttccagtatgttggcccatgaagaaatcattggtggaattgaaggtataagggtctgcaggaatgcgccctcaatctcacaccttctttttgctgacgactccctagttctgatgaaagccacggatcaaaacgctcatactttgaagaggattttggacacttactgttcaagctcaggtcagctggttagtaatgcaaaatctagtatcttctttagtcctaacactggagttttggttagggaaggaatttacaacagccttgatattttaacggaagcgcttactgataagtatctaggtctccctaccatggtgggagtggacagaagcgattgcttccagcatcttattgatagagtttgtcaaaggttaaaagggtggaaggagaagattctatcagtccaaggtaaagaaattttggtgaaatcggtggcacaagcaatcccttcttacgctatgtctgtctttaaactacccaagggggttgcaagtccataaccgatgaaatctcggggttctggtggggagatggagaggaaaaaaagaaaatgcattggtttgcatggtggaaaatgtgtgtcccaaagaagaagggtggcatggggtttcgagaccttcacagctttaatcttgctatgttagcaaagcagtgttggcgactcctccaaaattctgattctctgtgtgcacgccttctgagtgctaagtactatccaaatggtgatatactgaaggcaggtcaaaaaagggctcgtcgttcacatggcaaagcattgttgctggtatacaaaccttcaagagaggttgtatttggagagttggatccgggtcaagtattagtatttgggatgatccttggattccctctagcgagtcaaggaaaatcatcacgcccaagggtggaactatgctgtcaaaggtcaacgaattaatcaatccacacacaggctagtgggatgttgagctccttcaggacatcttcatacctgtggacgttgctagaattgtacaaattccattgcaggttggagttatggaggattttgttgcttggcaatttacaaagtctggtaccttttcggtgtgttcagcttatcacgttgaattcagtcaccagttcgggcgtcactttggccaaatggatggtccagaaggctctcagcttaatccagtatggaaagaattgtggcgtcttcgtgtcccggggaaaattaagcactttggctggaaggttcttaagggagttctgccttgtttcggggtgctagcaggtaggcatattcctttgacccctcaatgcccgttgtgcaaagtgggattggaggatattcagcactgcatattcacattttcaagggttaaggaggtttgggacgtgcttcagctgacagatactatacagagagcagtactacaagatcgctcagggtccatcactctagtgatcctcctacaatctgatagtatggttcatgaaataccggtagcagaactaatactagtgaccatgtggtacatttggtggcagcggagacaagtggcaaaaggggaaatcattcagacccctgacagaacggctttgtcgattagggtactggctacaaactttgttcgtgcaaattcaccaaaccagccaacccgaaagatagaccagatatggaggaaacctgattcgggctttgtgaaaatcaacgtggacgcgtcattccatgctgatacactggctggggcctgtggtgccgtggcgagagatgatcaaggtaacttcattgctgctgcaacctgggttctgcctcatgtcccctcggctgattctgcggaaacaaatgcaatccgtgggttgattctggctgctaatataggatgcaccaaagttgcaattgaatcagatagcacgaatgctattgaggctgcttctgaccctgatgcctatatgggaagtgatgctgcaattataactgaagctacaatattggctatggagttttcttctgtttattttgttcgatgctgtagggaagccaatctagctgcagattgtttggcaaaacactgctttagcactagaacttcagagttttgggactcttctccacctgactttattcttccaaatattgtaaacgatacgtctatcatttgaggaataaagttaatgataaaaaaaattaaacacatgattttatcgatcactcgtactaagtttcaagaggtgaaatttaacaagtattttcaaaattcatcaaaagatattaaaaaaagaatcatatttgaaagggctcatcaggaaaaacatgaatacaaaaacataacttaatttgaattttttattcaaaagatataaaaattaaaaatcaaaagctaaaaaaatatcacgcacgagagattcggtgccccgcacctgcatgccgcaaaattttcttccaaaatatagtactgctgtaactagatataagcaaagatgcagacatgcaaaacgaacaatcttacaaaggctatagcctataggcatcaagaaagccatatgccaccgacgctataactatgttgagggatgtggagggtcaattcaaagattacattgtcacccgtgtaagatagaaaactccctagccaaaaccaaaacgaagctgcatgtggtggtcggacttacagcagggtcggccggtccgagaggacaccggctgacagtgatgtggcgatggctggggagagggagggagggagggagtcgacggcgtagaggtgtgatggggagtcggggactggcgggcgggggcggcttaaagtctgatgcgatttttttcgatggggtcctcctctacattgcaatggaagcatgcgcagaaatatagaaagaaaacacaacaaattcagttttcataggttacacaaaatatagcagaaattcgtaggggcatgcagtgagtgtttaatcattcaaacttccattcttttcatctgaaaattccgattttctcggtcgcaggtatcaagctccagaattgaaacaataattttttttttttttttgctagtcgcaggtacaaaaatcgtgattttatcggtcccttctactaagattcgagagttgaaactttaagcgcttttttaccagccgccagtactaaatacacaattttatcggtcgctcgtactaagtttcaagaggtgaaacttaacaattattttcaaaattcatcaaaaagtattcaaaatagatcttatttgaaagccctcatcatgaaaaatgtgaatactaaaacataacttaatttgaactttttattcaaaagataaaaaagtttgaaaatgaaaaagccaagaaaaatagcacgcgcgagggaatcaatgccccacctgcacgccccaaactgtctccaaaatatagtacgactgtacctaaatataatatatttcgcccaaagaaactaaatataagacgttttgcccattcaaagcaaagatgcagacaggtaaaatgaacaatcttacaaaggctataagagtgtcagatctagggttttgaaacagggtggtccaccataaaaaaatgaccaccaatttgacacgccaatggggatccatgactcaaacttgggtgttcaaaataaagaccaaccaaacttgtcggatgtaatatctaaaagtgttatgtagcaattaactttttgcccatcatagtgacgaagtatctcaaatagcttatagaaaaaatatatggaaacagtacactttttggctactactatttcttagactctttcaaggaaacatcgtttttccaattttgactgaattgatcggagcgtagacgagcaaccagagctcaggaaagaggtcagatcgtcatagagcaatcgactataagtataagagtgctggcatgagagaagatagtctctctcaggaaacatggcacgatttctcttctttcttttcacaataacaagaaaatacttcactacacaatcatgcaatatgtcatggttagaaagaaggcatggcactgttatgctttccttgtagtaatattcttgcgtggaaaatgaaaaaaaaattgttttcaaatagcaatggtagccaaaaagagattagcaaaaaatcagcggtggtaattgggctcaagagttagcgagagtcaggaggaatcaacggatgagtagagcgtctggctggtccccaatcaacggacgagtagtgcctacaacttcggcaggcatagtgcggtgctcaactctttttttagcaactgcatcctttattaaacgtttaaatacatgggaatacagatgatgtcgggcaaaacactaagccacacatcacgcccggggcaaagagaagcatctgcctttgctaaggcatgggcctctccattatgcttcctattttcgtgaagaaactggacatcctggaatcgcctcctctggtacttgatatcttgcatgatggaataatatcggcagggaacttcgtcttgtatgttcgtcactacttccaaacaatctgaggccacgcatatagattgaacctgcagatcagatgcaagtgagagggcctcgctgcatgcctgtgcttcaagtattgttggatcaagtcgaccttcttgaatgatagccgaggcacccagatagttgcctcttttgtcctacatatcactgctgaagctgcccggtctccaatattcgaaaagcctccgtcaacattcatcttgacatcgtgatgctcaggcggaagccactcggtcggtgtcgaaatcgcgcggctacttctagtcacatgcaggtccctgggattcacatgcaggtccctggaaatttcatgcaggtccttggggcgtgattttctatcccgggtcatctcgagctctgttatgaacttgttgataaaaatatgggtactcagtgggctctggaactgattgtcatgtatggctcggtgtctcgcccaccatatggcccacattgtaaccaaaacatgtgctaggtccaccataggtagagtgtcaacgagccataacatccatagctttgcatctttctccctgtttgagatgattgtttctgtcagatcctcatcggtgagagcccaaacacaacgagccatacaacaatcaaagagggaatggcgccatgtatcgactgccgcgtgacagatcgagcactccgccgaatcagccatactttgatgcttacagacatctcctgtagggtttgagctcttggccagtctccaggcaaaaattcagactttcgaaggaactgcagcgccccagagtctcgaccaagaccggcgatctgaatcgacccgcgagtgtccctctgtgtgttctagccaatctgtgcgctgctgtttagtggaggacaggagcttgtacggtgacctcaccgtaaaaactcccttgcgttcataatgccacgcccagaagtcatcgcgtactcgagatctgacagggatattgaggatcgcttccttgtccattgtgtagaagtgtgtttcaagcacgtcgcaatcccatgatgaggtgatgggggttgatgagttttgagaccttctgtggagggtttgatgttttggggaacaccggtcgaagcttaaaatctcgcggtatccagttatccaccaagatattggtgtcttcgccggatccaatgcgtttcactagctcaagctgtaatgtgtctctaccttctatcagagaacgctagacttgacatgggttcctgcccagctctgcttcaaggatcgaggaagtagggtagtaaacagccttgagaatccgggcgctcagggagtttggttcctggaggagacgccaagcttgccgcgcaagcaggtctagattgaagagctcgatgtcgcggaaccccatacctcccatgaatttcggttgtgtcatgattttccaggagacccaagtagttttccgctcaccattttttgatccccaccaaaacttcctcaagataccattgatgtgtagacataggcctctaggaagcttgaaacaagccatagagtatgtagggattgcttgagcaacggacttgatgatcacctcttttcctccaacagaaagcgccttctctatccagccttgcacttgcttccaaatcctgtccttaagatacttgaaggacccctccttggctctgcccacattgacaggaaggccaaagtatttttcggacaatttctcattttgaacttgaaatatttgcttgatctcatgcctcgaggattcaaaacaacctttactaaagaatatggatgatttctccttgttgatacgttgccctgaagcagcacagtatcttggaagaagggtatccactctgtttgccatctccggtgtagcattaaagaataaaaggctatcatccgcaaaaattaagtgatttacctggggtgcgccagctgccaccgtgataccattgacaatatcatctggtcttgtggatttcaggaggcaggaaagcccttcagcggctaataaaaataagtatggagatatagggcagccttgcctgagtcctcgggagggcttgaactcctcttgcttgcctccgttaaagatgaccgaaaaggagacatatgtaacacacctcattgggatgatccccagtttgagcataactctctccagataattccattcaagcctgtcataggccttcatcatatcaagttttaaggcataatacctgttacccttcagcttccttgttttcatatagtggagacattcataggctgatatgaagttgtccgtaataagacgtcctggtacaaatgctgactgttcttcagagatgatatgggggagaataagcttgagccaatttgccaatgccttggatgcaatcttgtagatcacattgcagaggcttatcggtcaaaactgtgctaaattgtttgaactagcaatcttgggaactaaaactatgaacgttttgttgatctcctccggggaatactctccattaagaactcggagcaccatagcaataacttcatcaccacacaactcccagtgcagttggaaaaagtgtgcagggaaatcgtcaggccctggagccttagtcagaaacatctgaaacaaagccactttcacctcggcattgctgtattgtgcattaagtgaggcgttcatagaagcgtctacccttgggggtatatgagaaaggacttccttgataccgactgtatcttctgaggtatacaagttactgtagaaggatgtagccatgtccgccatctcgtgctcgtccgtgcaggtagtaccatctggccattgcagttcgacaatgcggttcttggctttacgagcactagctttgcggtggaaaaaattggtgttgatgtccccttccgcaagccactgaatccgcgccctctcgcgccacatgatctcttccctaacaaagttctaccatgcgggcttccaccctctcctcctcatccgatggtctcgtgcagttgggaatcgaacacacctcctctagttccttgcgtaggcggcgtagttcagactggactgcaccaaaagtggttcgtccccaactttgcaacatgccagcaaccgaggccagcttgtttgacagttctgtaacggtgtgggcttttcctgttgaattccatgcttcagtaagcatgtctccaaaccgtgtgttccgctcccacatacactcatagcggaattgcttttgctttacccgcacacttgtaacaattaggtcagtctccaggagaatcgggcagtggtcaaactttgccgcagtaagatgatcaacagaggaaaaagggaaaagagcagaccagcaaggtgaagccaaagctctgtctagtcaaacacgacagaaatgtcctccagcaaatttcttctcccaagtccagtccagtccacgataacccaagtccgctagaccgcacacatcaacagcttccctgaatgcatcgatctgtgagctgtcacgttcattagggccatgctgctcttcaagccgcaagatctcactaaaatcacctatacacatccacgggagggtgctctcccccctcaaatgtttcatggtgtcccatgtcttgtaacgcagactcctggtagcttcgccatagaagcaagtcagcctccattgctctttccctggttctgtgacctaggcatcaacatggtactctgaataattctttattgcaacatccaaagagtttttccaaaagatacaaaaggccgccactgcggcccctacttccgattccaaaactaaaatagtacctaaagaagtccgaagaccttcaacaagactcttttgcatttgagtttctactaaacacaagatagctggccaactaatctccacaagatcacggatctctcgaactgttgcaggatcgcctatcccgtggcaattctaactcaagattttcattgggcctggcggcgccccaagtcggaacccgccaataatgcaaatgtttgtgttctgcttcaatggtgaggttattttctttgctttcttcacgaaattattttcaaattcattgaaaagtattcaaaatggatcttatttgaaagccctcatcatgaaaaatgtgaatacaaaaacataacttaaaattgaaaatgaaaagccaaaaaaaatagcacgcgcgagggaatcgatgccccacctgcaggccccagactgtctccaaaatatagtacgactgtaactaaatataatatatttcgccaaaaaaaactaaatataagacgttttgcccgttcaaagcaaagatgcagacaggtaaaatgaacaatcttacaaaggctataagcagtgtcagatctagggtattgaaacatggtggtccaccataaaaaaaatgaccaccaatttgacacgccaatggggatccatgactcaaacttgggtgttcaaaataaagaccaacaaaacttgtcggatgtaatatctaacagtgttatgtagcaatttactttttgcccatcatagtgacgaagtatctcaaatagcttatagaacagatatatggaaacagtacactttttggctactactatttcttagactctttcaaggaaacatcgtttttccaattttgactgaattgatcggagcgtagacgagcaaccagagcccaggaaagaggtcagatcgtcatagagcaatcgactataagtataagactggtggcatgagagaagatagtctctctcaggaaacatggcataatttatcttctttcttttcacaataacaataaaatacttcactacacaatcatgcaatacgtcatggttataaagaaggcatggcactgttatcctttccttgtagtaatatttttgcgtggagaatgaaaaaaaaaatactgttttcaaatagcaatggtaatagggctaaatgtgacaaagagattagcaaaaaatcagcggtgttaattgggctcgagagttagcgagagtcgggaagaatcaacggacgagtagagcgtctggctggtccccaatcaacggacgagtagtgcctacaacttcggcaggcatagtgcggtgctcaactagtctttaatagatagtgttgggcttttatgttattcacggttttacctcctgtggtatatggcccgatccaaaattcaagggtgtgccacgatccaccctgtccaccatatagactagatcgggttcgcgccgtggcgcgagggtgccggtcagaacgtttagacaaaacatgtaacaatttgtcggtaagagcccaggaatagcatgtgtagacaaccaattgtgttagaagcaaaacataatgggactgaagatgaacatcaggttataatacagaatcaagctcggtgctttcatacgaccaaaggtaaaacgcaggaccatacattactttttacgacagagagataggaattaaaatctgaaatctatacatgccttgttcagaacaaagtgaaaatagcaacataccaccaaatggtaccttccactacaaaagacaacaacgggaatctaaaggcagatatcgaggttggaacaagcaaaccatcaaacaattgtaacgacgaattaaaagtaaccatcacaggagacttgctgcccagacatatcttgtgatggtaaattgcaggggcagctttagagcttgcaacataagggcaaaaaatatgggaatagggaatcaccattagatagtcatcatcctgtagaggaaagtcaaggataaaataattgttttacaaaaggatatgcaggcaagagtaccgctgctgtaaaactactgaaactactctatagaattaacagaattaagatgatctcctggtgtagttcaagcaatactggagtagttcaagatactgaatcttggtgcaacactaagcatgagatacaataccccacaaaattaacacaatcaagaaagtataaaagcaagttaacaatctaataaggcaagtttcagtacttcaccaagtcaaaatctactgcaatctttaagctactgaatattcctaacagtgaagtgaagttccatttcaagctaatgcaatctttctcttaaatctactcatgcatctgtggaacttagcagtattcatttaagaatgcagtaaattaacttggcagtatgcaaactttgagtaagttgacttggcattatattgaaattccactgcagtctttaaactactgtaaccagtcggaaatctactggaaacccccaaaaaaggttcatcttttgtactgagtaccttgcggatggcgtcgcagccggcgaggacctcctcgatctgcgcgcacttcctcgccggcttattcttgtcatcctcgctggcttcctcgagcttggtcttggccttgccggaggcaccgggcttggacttgggctcccacttcaacttgtgatcaaagctgacgtggttggggggaggcgagctccgcctcccacttgagagcccggtcccgccgtgcggcttctcctcggccgtccacttcaccttgcagccccccggggaggtggcggcgtaggtgtacttgcggcgagccggctgtgcgccttggtgcgaaggtgccggtccagacgttgtaattgagcaggtaatggtgtagttagtaggaaggtttgagaaactatttacatctaaaaaatcaaagtaaccatccatgatagatgagtttactatattacaaacattaaaataaacccaatgcaaggtaagcaaggcatagtcaatccacaggataattgatttgcatggtcacgacaaaagcagtaagggaatgttggctatatgattctcccttgttgatgtaggctagtgttgcttggcggggtagtagatgtaggcttggaggaggatgttggctatatgattctcccttcacaatcacctatgtgagacccagcatgccggccgaatctcctctgcgatggagggccgccccctgaattcatccgtgaagagatctacaacggtcttcccagcccatctgttcttcgcctgcaaaccagcaaaccaaattcagagtttggtccaaacaatatctggcaagactacttgtagcaaacaaattgttaatgttatcctatcattggaacaaattagaaaattaggctaaagtttcagagttctgaatgattgtgcggtttcaccattcttagtggagcagcaaaatcaataactactgcacgtactgaaggaaatatgccatagaggcaataataaagttattatttatttccttatttcatgataaatgtttattattcatgctataattgtattaaccggaaacataatacatgtgtgaatacatagacaaacatagtgtcactagtatgcctctacttgactagctcgttgaatcaaagatggttaagtttcctagccatagacatgagttgtcatttgattaacgggatcacatcattaggagaatgatgtgattgacttgacccattccgttagcctagcacttgatcgtttagtatgttgttattgctttcttcatgacttatacatgttcctgtaactatgagattatgcaactcccgtttaccggaggaacactttgggtgctaccaaacgtcagaacgtaactgggtgattataaaggagtactacaggtgtctccaaaggtacatgttgggttggcgtatttcgagattaggttttgtcactccgattgtcggagaggtatctctgggccctctcggtaatgcacatcactataagccttgcaagcaatgtagctaatgagttagttacggaatgatgcattacgtaacgagtaaagagacttgccggtaacgagattgaactaggtattggataccgacgatcgaatctcgggcaagtaacataccgatgacaaagggaacaacgtatgttgttatgcggtttgaccgataaagatcttcgtagaatatgtaggagccaatatgagcatccaggttccgctattggttattgaccaagaatagttctaggtcatgtctacatagttctcgaacccgtagggtccgcacgcttaaggtttcgatgacagttatattatgagtttatgagttttgatgtaccgaaggagttcggagtcccggatgagatcggggacatgacgaggagtctcgaaatggtcgagacgtaaagatcgatatattggacgactatattcggagttcggaaaggttccgagtgattcgggtatttttcggagtaccggagagttacgggaattcgccggggagtatatgggccttattgggctttaggggaaagagagaggagaggttgggcgcccccccaaggcctagtccgaattggactagggggaggggctgcgccccctccttccttctcttctcttccccctttccttgactcctactcctactacttcgaagggggggaatcctactcccggtgggagtaggactcctccttggtgcgccccttctaggccggccaccccctcccttgctcctttatatacgggggcagggggcaccccataacacacaagttgatctacggatcgttccttagccgtgtgcggtgcccccctccaccatattccacctcggtcatatcgttcgcggagtttaggcgaagccctgcgccggtagagcatcatcatcgtcaccacgccgtcgtgctgacggaactcatccccgacgctttgctggatcggagcccgaggatcgtcatcgagctgaacgtgtgctgaactcggaggtgccgtacgttcggtacttggatcggtcggatcgtgaagacgtacgactacatcaaccgcgttgtcataacgcttccgcttacggtctacgagggtacgtggacaatactctcccctctcgttgctatgccatcaccatgatcttgcgtgtgcgtaggaatttttttgaaattactacgttccccaacagtggcatccgagcctggttttatgtgttgatgtcatatgcacgagtagaacacaagtgagttgtgggcgatacaagtcatactgcttaccagcatgtcatactttggttcggcggtattgtgagatgaagcggcccggaccgacattacgcgtacgcttacgcgagactggtttcaccgctgcgagcactcgttgcttaaaggtaactggcgggtgtctgtctctctcactttagttgaaccgagtgtggctacgcccggtccttgcgaaggttaaaacagcaccaacttgacaaactatcgttgtggttttgatgcgtaggtaagaacggttcttgctcagcccgtagcagccacgtaaaacttgcaacaacaaagtagaggacgtctaacttgtttttgcagggcatgttgtgatgtgatatggtcaagacgtgatgctatattttattgtatgagatgatcatgttttgtaaccgagttatcggcaactggcaggagccatatggttgtcgctttattgtatgaaatgcaaacgccatgtaattgctttactttatcactaagcggtagcgatagtcgtagaagcaatagttggcgagacgacaacgatgctacgatggagatcaaggtgtcgcgccggtgacgatggtgatcacgacggtgcttcggagatggagatcacaagcacaagatgatgatggccatatcatatcacttatattgattgcatgtgatgtttatcctttatgcatcttatcttgctttgattgacggtagcattataagatgatctctcactaaatatcaagaagtgttctccctgagtatgcaccgttgcgaaagttcttcgtgctgagacaccacgtgatgatcgggtgtgataggctctacgttcaaatacaacgggtgcaaaacagttgcacacgcggaatactcaggtcaaacttgacgagcctagcatatacagatatggcctcggaacacggagaccgaaaggtcgaacgtgaatcatatagtagatatgatcaacatagtgatgttcaccattgaaactactccatctcacgtgatgatcggacatggtttagttgatatggatcacgtaatcacttagaagattagagggatatctatctaagtgggagttcttaagtaatatgattaattgaactttaatttatcatgaacttagtcctggtagtattttgcaaattatgttgtagatcaatagctcgccttgttgcttccctatgtttttgcttccctatgtttttatatgtgttcctagagaaaattgtattgaaaaatgttagtagcaatgatgcggattggatccgtgatctgaggtttatcctcattgctgcacagaagaattatgtccttaatgcaccgctaggtgacagacctattgcaggagcaaatgcagacgttatgaacgtttggctagctcaatatgatgactacttgatagtttagtgcaccatgcttaacagcttagaatcgggacttcaaagacattttgaacgtcatggaccatatgagatgttccaggaattgaagttaatatttcaagcaaatacccgagttgagagatatgaagtctccaacaagttctatagctaaaagatggaggagaatcgctcaactagtgagcatgtgctcagattgtctgggtactacaatcgcttgaatcaagtgggagttaatcttccagataagatagtgattgatagagttctctagtcaccatcgccaagttagtagaacttcgtgatgaactataatatgcaagggatgacgaaagtaattcccaagctcttcgtgatgctgaaatcgatgaaggtagaaatcaagaaaagagcatcaagtgttgatgattgacaagaccactagtttcaagaaaagggcaaagggaaagaaagggaacttcaagtagaatgacaagcaagttgtcgctcccacgaagaagcccaaagctggaccaagcctgaaactgagtgcttctactacaaaggaaatgatcactggaagtggaactgccccaagtatttggcagataagaaggatggcaaaagtgaacaaatgtatattggatatacatgttattgatgtgtactttactagtgtttatagcaacccctcagcattttgatactggttcagttgctaagagtagtaactcgaaacggaagttgcagaataaacagaaaatagtaaaaaggcgaggtgacgatgtgtgttggaagtagttccaagattgatatgatcatcatcgcacactccctatactttcgggattagtgttgaaactaaataagtgttatttggtgtttgcgttgagcatgaatatgatttgatcatgtttattgcaatacggttattcatttaagtaagagaataaattgttgttctgtttacatgaataaaaccttatatggttacacacccaatgaaaatggttcgttggatctcgatcgtagtgatacacatattcataatattgaaaccaaaagatgcaaagttaataatgatagtgcaacttatttgtggcactgccgtttaggtcatattggtgtaaagcgcatgaagaaactccatgctgatgggattttggaatcacttgattatgaatcacttgatgcttgcgaaccatgcctcatgggaaagatgactaagactccattctccggaatagtggagcgagcaactgacttattggaaataatacatactgatgtatgcgatccgaagagtgttaaggctcgcggcgggtatcgttattttctgaccttcacagatgttttgagcagatatgggtatatctacttaatgaaacataagtctgaaatagttgaaaagttcaaagaatttcagagtgaagtggaaaaatcatcgtaacaagaaaaaataaagtttctacgatctgatcgcgaagacgaatatttgagttacgagtttggtcttcaattaaaacaatgtggaatagtttcacagctcacaccacctagaacaccacaacgttatggtgtgtccgaacgtcgtaactgcactttattggatatggtgcaatctatgatgtctcttatcggttttaccactatcgttttggggttgtgcattagagacagctgcattcatgtttaaaagggcaccatctaaatccgttgagacgacaccgtatgaactatggtttagcagtaaacctaagctgtcgtttcttaaagtttggggttgcgatgcttatgtgaaaaagtttcatcctgataagctcaaacccagatcggagaaatgtgtcttcataggatacccaaaggagaaagttgggtacacattctatcacagatccgaaggcaagacattcgttgctaagaatggatcctttctagagaaggagtttctctcgaaagaagtgagtgggaggaaagtagaacttgagaaggtaattgtaccttctcccttattggatagtagttcatcacagaaatctgttcctgtgactactacaccaattagtgaggaagctaatgatgatgatcatgtaacttcagatcaagttactaccgaatctcgtaggtaaaccagagcaagatccacaccagagtggtacagcaatcctgttctagaagtcatgctactagatcatgatgaacctacgaactatgaggaagcgatgatgagcccagattccgcgaaatggtttgaggccatgaaatctgagatgggatccatgcatgagaacaaagtgtggactttggtggagttgcccgatgatcggcaagccatattgtataaatggatcttcaagaggaagacagatgctgatagtagtgtcactatctacaaagctagacttgtcaaaaaaggtttttgacaaagttcaaggtgttgaatacaatgag

SEQ ID NO: 19 - DNA, 27610 bp, Artificial Sequence
  Scaffold 1893110
cggcggccggcgggggcgggagggtcggcggcagcgggaggggagcgggggaaaccctctaaagatcatctttaaccatgcaaagtctatgatcatcatgtagcaaaccgcacttacccaggtctttgtcgggcctcaatatgtggggtcgatgtccatgtcgtcgtctgccgtagcatggccggctggtgcgtttacgtgcgtgcatctccatgtcgtcgtctgcgtgcacctccatgtcttcatccgccgcgtgcgcgtccacctctgcctctgcgtgcacctccatgtcgccgttcaccgtagcatggccggctgctgcatttagttccgcgtccacgtccacgacgtgtgcgtgcgcatccacctccgcgtctgtgtgcacatccaacatcgtcggtcgcagcttagccggctgttgcgtctacttgcgtgtcatcgttcgccgtagcctggccgacttgaccggctgctgcatgcacgctcgtgtccccgtgcatggcgtccttgtccgttgcacgtccatctccaagacagccggcaccttgcccgacaccaccgccgcaccgcccagacacatcatcgccttacgcccggcgagcatcagtcggccgtgtacggaacggtgccagcggccacctagaccggccgtagagtctaatggctcccacgtaaaagaaaaaatcctaatggctgtcatatgaatgctggagccctggacgatataaaaggcttacttcctccaaccagacataaggcgagatatgtgtagctggtttgcgtactgccacatgagtgcaatgtttgtggtttgaatctgaatcggtacagaattttattatcactctactttttgtccaccacccactgacaagtgggacccgcatagacagagagagaaacaaggtgccttgtggattatttgaccagtcaaatagatgaaatacggggctatacgatctggcagtgaccgtataatcacctcaacacgtatatagtgaccgtattaatcataatcttaagtacagtaaccaaaatgagcgtatgcaacaagttcaatgactaccaatgcattttactctaaaagaaaaggactgtcccagtgtcccctgccctgcccctgagaaagaaagaaaaagtaactctgaactttttttcttctacaaataaaatgatgttcccaccatttacttaagctagcaatgaggcaattatttactaattaatcaaccctcatccaaaaagcaaacaaaataagagttgtacttcctcaactatcggcaaaataaaaggaaactctagttagttcaaagttggtcccttgagtgtcaaaaccgtctacattatttgtcctatagctccacacaattgcttttatggtgacacggcgtggtttcaagcgcagcaagatgagaacaaaaatatctacaatatccaaataaatatcaaaaagttaagcagtcacgtatctagtaaaattactaatgattccaggaatgtaaaatgaacaacaattataaatattctggaaaagattggagtttggcaacaaaattcaaaaaaaccatggaacacgacaaatatattcaagaaaaccatgtacaacggaacctggatgctcatattagttcgcacatattctacgaagatctttatcggtcgtaccataatgacaacatacgttattccctttgtcatcggtatgttacttgcccgagattcgatcgtcggtatcttcatacctagttcaatctcgttaccggcaagtcctataaaagactcagttggtgatgatggaggcgtgtccagccgggcgtgcagcggacggcgcagtactattcgatttgttataaaaaacaaagaagaatatgtagtagagatagagactattagggaggagcacgaggttgtgggagataaggatgaacattcatgattgcacctaattattagttatttttctatttcccctgaacttttctcattttcttttctttctttctttctttgtgttttttaaacttctactttcatggtttttctattctaatttttttacacacagaaatattttgtttcccactttttttctttcacttagttgagtttataaaaatagagaaacttcagccgttttgtcttttcatatatatctttctagttacctcattttttccgtgatttttcacataggaaaaaaaatcttgatggttctaacaagtgagattctagttcactttattttcacgaggagagcctagcccacttagttggggatgagggtatataattccactgtctaagttcaagtcctcctagtcctaagcatgcatccgaattcataattatattttggggactcccttgaattcttttaaaaataatcagtatggttttggcaccatcgagagaccaaaagttcccgtattgaaattaatttaaaccttggcaattattgagagaccaaaacatatttttatccttccatttacccatacatgtggacaactaggattacattgtcgtctacttgttctagaacgtgttataaggagaatgggtaagcttcttttttttagggaagaatgggtaagctgttgttctagcaagttgtgctgcctttagcatgaccgagtacgcgtgtcgagtttagaagcaaagcttactctaaattaaccaacaagcaggattaatcagataaacaaactatgcaatgaccatgacaggcaggatcatcgatctttgattagtagttggcctggttagtacgtagtggatcagtgaatactctagtagtgttacttttggcaacttgtgcttaggaccaccactaatagagccaaaaggaatcctatcactactgatctctgtacttttaactaaccggagagcaaagctagctactaattgggacttgcatgttctaacatcactcaagcctaagcccccattccattagaacatatactagcttatatttcttttgctttgtaggcgcgctcgctgaattccttattaaactctgtatagatgataaatttagtagtatatttatttggtgttgacgctattttttttccttatagatggtcaaagttaaatgtttaactagaaagtttctatagtgacctgcatgttggatcagaagcaataaattacaattattggagaggaaatccgcttcttcatctttatactacctctctctcagtttacagggcgtgcgcgtacccctaggtcatcaatttgaccaacctaatacaaatcatatattacaaaaaatataccaacataaacttcggagtttctactttcaaaagatatatattttgtgttatatagtttatattaaggtgataaaactgacaacctaggtatacgtgcaggacttgtaaactgaaacggaggtagtagtaaatattagatttattacgcaatcacctcctctcagatctcgaggatgcccacaacttgcaagatcgagggtggttacaacagagtggaggatgatcgatggcgcggatgcaactgtagctacatttcaaattgatggatggtaatgttgtaatatgcaggttgatcatggtgttagtgcccaaagattgtagcgaatggtgtggaaaaatggcattgatgaagaggcaatgacaatatactggaagtggcagcgggttttttggtgaactagtttgagaaaaggaggtgtgaggccgtagaggtggtgggctaagacttttcatttggcaaatagggaaacaatgggaatgcagcaaagcggaactcattgaatggaaagggaaaactattatttgagtgtacctttcagcaaagagtacattccaccggatatgtgtagacttccgagatggatgtaacttgatccaagaaataaaaatttctacaacctccgtttacaaatacttgacgtggtactagctattgggagccatctgtagtctaatttggaaattaagtttagttaaaaaagtagccagtccggaattttttttgaagtgttcgcatgttttaatcaacaacacaatctttgggcactactacagtatatgttgagatctctaatgcgtgatatcgtgataatctatttatacatggtgtgttgtaaaacaattttagttgatgagtaaattaatggccctgtgcatccattttattgagacgatgggtttaatctcccatctagaaagaaaaaagaacaagttgaccattgtataccccccgcaaaaaaaaaaggttgaccattgtataccctagatttctctacttaataggatcgattattatttcctttttgtatacaaatcagcttatgtaaagtattcagaatcatggcgttgaaaagtacatgtatatttagcagaaataaacagttggtaggggctggtaacgcatatcaatccatacatttgatggtaggtgacttatttttaagtctatacgtggcagcaacaaaaataccatcagctaaaaatagcaccaatagtggtccatgagaccatagaaattaagctatggtacagtgttccatgctatgagatgcggcctaattagacatgccgaaaggccatagcggacggtgaggcgtccaagacttttacaatagtaacatgttatgacagacaacacgaaaaagccatgtgtactacgccacgaaccggggcattttcttgcacaagtctttatcactatatgtgagccatctttgatagtggaggttctaaaacggaagaattacttcttcaccttcatcaagcccgctcaaaagcgcacatctctgtgttcccgacaaacccgcgagaatgccatagagcctactacataagtgttatgtagaagaacctaccacacatcgtgctcattcagtaagttggctattgtacactgtagatacttggctcgattatcatttatatttttatatacacgaattgggtaacatattcaaaaacagggcgttgaaaagtatacgctacctttaagataaataaactggttggttgggttggcaatatgtgcaaatccacatgcgatggtagcaggatagctagcttaatttttaagtacattctcagatgcatctttgaaaataccttgctataaaaatggtaccagagtatagcgtggtccatgcactcatacaaagtattctcaattttgtatgtcccggagttgtactccccaccacgttacccactgtaaaatataggtaaaccatcttaggggtgcgcttagcctttgcaaatttaaaaacaatggcatcatgtacacatagtaatcatatgtacatactggtatgcataacatacgtatcgatcgatctatatttaacttaacaaattagtttgcaggcaggtgttgaacaagtagaaccagaaggtacccatcaacacacctcatgcaccctctccatgacaaagcttgcttactcagcttgcaacaagcaagtcttggtcgtcctcttctaccctctagctagctagctttctcgaccccccaagaaaaaggagcaaccaaaatctcatactagatcgattgatgggagctagctggttcgattagctgcaatttcatggcgggtaattaaggtactgatagtgttatccttcttctcctagctagctagatcgatcgggtttttcaaccccggggacttcagttccatcttcttcttggtcatgaaatcaaaagctaacaaggagctgatacccaatccccacacatatgttgaatcacatctatatttgtagcacctttgcttcgatctcttgtgtgttgacatgaagcttctctgatctttctgtttcagatccagggcagcatagtggagctagctctccaagaagtcaactaagcaagaaagcttgctagccgcccttggaactacacaaggaagaagaagaccagatcgaggaaggaaagaagctataggctagcacagagttaggttaggtggagagatggccaacaggtggtgggacgaagggcggctgacggaggcgccggcagctgcatcgggcctcgccggcgaccagaaccggcagcagctggaggacgccatggcggcgcccaaggtggacggggagagcagccacagcggcggagggagcgggcaggacgacgagcacgagcccaaggagggcgcggtggtggtgccggcgaaccggcgcccgcgcggccggccggcggggtccaagaacaagcccaagccgcccatcttcgtcacgcgggacagccccaacgcgctgcgcagccacgtcatggaggtggccagcggcgcggacgtcgcagagtccatcgcgcacttctcccgccgccggcagcgcggcgtctgcgtgctcagcggcgccggcgccgtcgccgacgtcgccctgcgccagcccgccgcgcccggggccgtcgtcgcgctccgcggccgcttcgagatactctccctctccggcaccttcctccccgggccctcgccgccgggctccaccgggctcaccgtgtacctcgccggcgggcaggggcaggtggtcgggggcagcgtcgtgggcgcgctcaccgccgccgggcccgtcatggtgatcgcctccaccttcgccaacgccacctacgagcggctgccgctggacgacgccgaggaggatcaccagctggaggccgcccgcatgcacggagcccccggcggtggtgtccctcagatgatggccggcgacccctccgcggcggggatgccgatgtacggcgtgccgccgaacctgatgccgggaggcggtgggcatgcggcgccggaatgggcggcgcatgcacggccgccctactagctacctagcaccatttaatcaggagtagtcgacgtttccaagcatcaagatcagctcccctcatcatcatcgaaatccatcctaccaataactagacttgcattgcatatatttagcagctggtaagtaactagaatctctggttttgctttgcttattagtatctgccaaaaatcatctggagagttgcttgctccgattcatgtatggggaattataaatgagctccttttactgcctgcagattggttattagtgatcatatatatagtaaaaacaaaactcttcaagtatatgactcttatataccccatcctctctgattattgcatgcatatatattctccctgcataattcacaaagttcctttaacttaaactagttactgagattggttatgtatttatgcaattgtggtatgagcacaattgcctgacattgctgagaaatatttataatgaattcacatttcttgcaagattaaccagttctgcttgatccaatcgatcaatgtacaccagatagttatgaaactgaatcttctgtttgattaaactaaactttagttgagtcatttttcagcaaattttaatcgcttgacgttgctcatcctttggttactgaatctcggtccacattcctagcaatgttatgataggttgatgttgccatgactgcacaaggtggccatgtgtggtcattccatcaagtttatgggactttttgattcgcatgatcccgaaacataagattagaaagacaagagaatttcgtatagtgaaatgttttttcatacatggctgttttttttagttggaagtttttttttttttagggtgtatggttgtagcaccaaacaatgaaaaaaaaaatgtgcttctttcttcttcgcgaagaaagaaagggtgtcctcacgcagctgtcaagagcatcttcttccgtcgccatctttcagcgactcccctccgccgacgacctcagtcatcgattcgtcggtggtgaggagggccgccggttccacgcgtgtggatagtttaggccatagtagattaggtttttaggttgttcatcttggcttcgacggcgacgatggctacgctaaataaagaatcttcaaatccttctccgacgaggcgatctgccctgtggttggggatggatttggaaactagtccgttcaaataaggatagcgtggcggcggcgggatctttgtggtggacttgtgttctctggctctgtcgttgcgacatcgtttgctctagtgccggcacagagcttggaagatagtccaagagtggatgcaaattgtggtctgcatcgacggcatcaggaagatggtgaatcgtatgctgggttcatggttcatggatgacatgtatggttgtctcctccgatgtcttagttgtgcgggggtgccagatctggagttcgatggcgtgtctggggtgttgcgccggtctgattcgttcaacgataatgatttcacctttgggccaccttcgagatccgcaaagctgcacatcagcgatggaggcgctttgaggttgagtggggaggtgatacatcattttttttctttactggctgctatgctagtgccaggtgacgggtgttggtgccaaactcagatgattattcggtcttgattgtaatttctttcttggctgatatttctttgtgcaaaggctagcgttctgctgtcttttcaggtttgtcaaatcgatgtttacatggcttatactatgatctttatgatataagtagacatacattatcatgaaaaaacattttatggttaagtgcatccgctatatagttgtcttggacaggattggagggaaaatgccaacgtgttaaaacttgaaaatttaaaacataaggcgtagtttgagtgtccaaattcatgtttcgaccgtgaatctcctgtacaatgtttactcggttacaaaattaaaacaacacggaaatgtttcaaaaaatatatttgatggtggctatttaatgtaacaaagatgatatggtcaaggcgttattttggatagtcaaagtaataagtgagtacggtatgtatagtactctggcatgagacttgtcagtagagtatacaatggcgtggtccaatattcgtctcgctcgcgtgcttgcatcggacagatcgatattgaaaaaggttgagtagctactccctccgttcgaaattacttgtctcggaaatggatgtatctagaaacgtctagatacatccatttccgagacaagtaattccgaacggagggagtagctagcagctgcccccctggaatcaaatttcgaaaccgaaagcaaattgatcccagtgcacacattggtgctgacaaaatgaaaatagtatcatcctagctacctaggggaccgatcgatatgctcgctggccggttattagaggtgcatgcctgtactagtttcagctcggctcacatatgtgtgtgcgttctttcattattatatatagtcggtacatacgttcttccattattatatatagtcggtacatacttgcatgtacgtaatgtgtaataaagcttaaaaggcggcttcctctcggtttcctcctctaattctagacggctaggacaaactctttcctttagattttatcggtgagcctatggattcgccttccctctgttagccacttcagcggcggtgatggggaggaaaatcccgatgccttcgctctggttagtagtttaattagattttaggatttttaatccttgcaggtggcactcgggtggatggtgacgcttcttctttaagtatgtctttcaggttttggtcctccttgcatatgaatgaaagaaatgaaatagatgagacattctttaagcaagcatctatccttagacataatttacctgttaaaactcttgaagatcctctaccatccaagagcgatcatgtgtttgaattaaagaaactacctgatacactaaaatatgcttatcttgatgaaaagaagatatatcctgttattatcaatgctaacctttcagagcatgaagagtttgtctgtctgggcgtagtcgaccaacctccgtcgtagattcctgtcgtctccttggggtggtgagatcagtgtttctctcatgtgacaagatctgatggcaggtgcttcagaaatattcaaggtttcaacggcgacgactacggattcaggacgctggtccttaaggggcacatgcacgaagacttcccagttgtcattgacaaggtcaagctggctccggtaggggagcgacgacaacaacgcgtcggcggatcgttctgacgacagtagtggtcgttcgatggtctcagaatctcaatataatttttattatgtttgagatgctttgtactttcggtgaacttttacaatagatctggtcatttttgcaataaaagggtatatacatagcgagatgcactggatttgttggttgaaggatattaacaaaagcggctgcaacaatcattattaaattttagttacttctaagtttgttcttagccattgttttcatttttactgttggagatgcatacttgccacatgttgccaacctactccctctgtttcaaaatataaagtgtattagttttttcaaaaatcaaacatgcgcatgtttgaccatgtttttagaagtagtttcatattttatttatttattattctatatgtcaatattttattctataatcttgatcaaacatagacaaatttgagttgcacgacaatcgatacaccttatatagtggaacagagggagcattatttttattaataggacaatgccagtgcgttgcaacgggatataaatgttctagttagcttatgatttacctgcccatattaacaccaatgtataaataaatgtttatcaaatctcgttcatgatttacccttatattttgatgagaagtttgctagtaaattggagtgaaatttgttaagaaggtaagtaaattagggttattgattatcatacgggaaaggttgaatgaaggggtagtggtaaaaagaatgaaacatggaaccatacattctttctaaatagtagagatagaaaaagagatttactagtaaattaaagtgaaattggttcagaagataagtttatcaagataattgattatcatatggagatgattggaggaaggcatagtgggaagaaaaatgaaacatggagccttacgttctttttaggtagtagaaaaatatcattcacattaatgtaaaatatgcacaaaacacaaccacttatcgtatgttctagacttccatacaatgcataaattctccaatattttttctttctaagtgattggcatttattttactctatgagttatttaattatttccaagctatcgcagtatctttcctaaagtctatttgtgtttgcggacggagcacttagctattcttatatactccctccgttcccaaataattgtctttctagccatctcaaatggactacaacatacggatgtatgtagacatgttttagagtgtagattcactcattttactccgtatgtagtcgcttgttgaaatctctagaaaaacaattatttaggaacggagggagtactacacatgagtttggtctttggtgtagtatataccacgcaatgatcgcatattcggtagtcataatttaatttttaattgaatgagcgatgtgacttaaacctactcttatatttcatggatgtacgacttcaaaatttatatatttgtacattataacctggtttattgatatccagtcacgtttactctcacgtgtgtaacttattaccttctttttaggtcggtgtaacttactagctagttttttttagaagaaaggaaaagaataaaatgtgtgccaacgggcctatgtgtggtgggcctgcatgtggagcggcctgtccagtatagatcatcaacttgttcggccgcgtatggtaatattattagcgaaattaagagtagagctttaacgttcaactgtacattcacttatgaaggtagaactgcgaacgttgatgcagataggtcagccaagttttattatgctttttgatcaaggacgacacatttggttggtccatttccttgtccctcgatcccatttatatcccatcccgtgtggattttgaacaataaaacttggtgttacctctaaaaaaacttgtttggccacatgtccgtgagagcaactaattaaggagcgcttctttaggatcctcctaacgatcacttggggtgggctgaaagcgcgacactcagccgccgccatgtttcgcactctgggcgctttctttggattttgttttttttttatttttcgcacgcgttttcggctttttagatggttttttcagctttccacctgtatttcttagcttttcgacaaaaaaaaattgcacaaaaaacgtgtttcttttttcttctacttcctcggaaaaacaaacacgttctgtttttgcttccgtaagaggcagggttttgcttgttttgattccgcgagaggcataaccgtgcttctcgaaaacggaaataaacgtgttttttttctccttccgtgagaagcgcgattttgcttacacaagaggcaaggccgtgcctgtcggaacaaaaaaaatgtggtttgtcttttattttcgtgagaggcatgattttgcttccgcaagaggcaccaccgtgcctctcggaaccgaaaataacgtgttttctcttcttttttttctttcatgagatgcacggttttgcttccttaaatcgtgcctcttggaagcagaaaagaaaacttgtttttttgtttccttccgcgagaggcgctgccgtgcctctcgaaaatgtcttcaaaaagggaaaaagagtgggtttttttcatggaaaaaagttcatcaaaacctatcaacataaggatctagttttgaagatctcaatgcgaggaatctagtgatgaaaacggttgaagatttgaacgcacggtttgagagatattttttaataaacaaatctacgaaaataaaagaaaaactctcttgttgcaacaagtgaaatgtgggagatgtgtgtgatctttggaaggagtactccttaattagtgatttcaattaatgattttgaatgtccatagccttgttattgcagcgccctctaaaaaattactaccgtgatggaggacggggtggctactctcctttacctactttctgaaagagaaatgccccgcagggacgtggagtttctacacccaggagcaaatgctcctggtgtgaacagtagaataaaaaaattaaaaaaatgtcaaaaaattctaaaaaaaatttgtagcatacttatacaaatgtttgttgtgcacgtaaaatttcgtcgcgaaatcacattggtggaaggtgtggtaaaaaaacaaaatcgatgctctgaaaatgttacttacaaaagcattttgcatctctgattttgtttttttcggcacaacttctacgaatgtgatttcgtgatgaaaattttcatgcacaagaaacacttgtgaaagtatgtcaccaaaaatattcagaactttttggagcatttgctcctgggtgtagaatggtattttcggccccgcaggggttattacgaagttcggtttgatgacaactctgccaaagttgctcttatatgatatccttctgtaaagaaatataagggcgtttaggacatttctaaccgatccctaaaaggccataagggagtacatacatacatatggagggcccagggccgtttcgtttatataaatgttgtacatacaggtcggtgaagaagtttgaagaggtctacttccagagcagcagccagcctgaccgcgcgcgtccaccgaaggacggcgctggaccagaagctcgtggagaaaacgctcgagctgatcgacactccagggagggagcctggctgcctgaatgcccccatcgtaagtgatgcgccatgcatgttgcatgagataaggctgacaagatcagctccacaagaacagctaagctataatgatattgtccaacatgaatcccttttcatctaactacaccgacagattcttccttgtcgcccccgtcggctttgatccgggccctctgagaggttaacagatgatgcaccctttgctttagctgggagaaaaatggagacatatacaacatattagcccggacacggtcatgactttcacaatcgcataaagaggcgaacaaacgccccctcgaatgtgagatgattcgtgactaacgaggcagccatgagttttgctgacctcttgcgttccgatttggctctgcaccgacacccggatggcgccttctggtccaaactctctgtatctcctcaattcatcgtcgacgccatcatcagcggcatcgtcgaacctggagggcgtggccctgtccagaagatcacatttggatacgacgtcgatccaaagacggtcgccaaaccgctcctttatatgcttgtacgtgatgtactgcaaaggacgaagaagttgtgtttagtacaaccaatcaagtaggagaatgcgaaaccaatgggctgaccggctgactgtgtcacctgtttgatattgggaggctagaacctataagtgacagaaaaaaaaatggagaggtaaataaaagatgcacctgatcagccaccttagtcccacagtcttcagatagatcatggacatacagaacagcaattggcatgtaagcaaggacagccagtgtcaatctctctatgttattccggtcatctgtcaaccacaaaatttggaacagatcaaaagggatgtgataaaggaaatgccagaataatacaggtgcaatgaagcccagcacagaacatggaatgtttgttaaagtacggtgtggagaacatacaaggacccaggatacagacgtttggaaaaaattactaattcaatatgaactaaaaaaaatctgaaaatatttttgaaataaacttgaccatccattgtaatcgtacaaaaattccacaaaagaaaagcccccgttgccttcagggcaaataaacttgactttttcttttaaaaaaattcccatatcgggtgtatatacacacaggaaccaaagggcatttcccaaccaagaaaggcttatatagtgttgacaaatgttacttactagagaacattttgttatgaatgtactccctccgtcctaaaatacttgtcgaaggaatgaatgtatctagacgtattttagttctaagatacatccatttttattcatttctccgacaagtattttcggacagagggagtacatgctacgggaaagctgctgcaaactttatgtaaaagggaattgcatattatctctgtgtgtgttgtgtgtgtgtgtggggggggggggggggggggggcaatcaatctattatttccaaaattcgtcatcctagtctacttggttccaatttcccacactgtattcaaagcatacgatgacatgactacttcaataagggaagtctgactgaccatcatgtcttgtgagaagccctggagtgtcagtaacctacaaatattttgcttgttcaatggcatcaggtctcagatggaaaggaggaaataagcattttttttctgaagagtagagaaaataaaaatgcatatgtttgaacctgaaaacgttcatgattggatactatatgacccattagaatccctcttgttgtgaaagggtagctgcagacctgcagaaaggcgaggtagaataagaaaacagaaacacaaaattatattgaaataaagaaaggagagtagaatgaggctacaaggtactcactactcagttaggctaaagcccagacaaaggacattgtcaacatgggttagaagtaaattagaacatttgtgctttgatgttaatctaaaacaagaagccctagtgctatacaatggaggaattattagaaaaaacagcattaatactgaataagacgagtagtagaaactgccatcttcgaggaattgtaaatgagcacaactgtttagaatcttaactactaaccagtaatacatgatttatcaggaagttgtgtctaccgccaaaccacactacagataaattaagcaataaacattattcactgcttagagatatgctcacctctggttttccagtggataatatgcgaactaatgatgacttccccacattgggtgatccaacaagacaaagtgtcggtatatgtggatcaacaactggcatagaacgcaaagcctgtaatagtttactgatcagtcagtgcttaataacataataagtgaaacagaaatcttagaagcctaaataagtgaaaaaataaattatgaggcaccataataactttcttggtttttcgcccacaaaaatctccaatgacaaagtaaggagtattaccttagcaacgtttattaaatcctcaattgcattctgaccacgctggaaaacttcctcaagttccttccggccctaaaaaatattagatgcaaccaaagaactcatcaaacagagaaagaagtgtaataaactgattatacgtttgaacaaaaaacagaagatagttgggtctaggaagacacttatttatatgtgcttaaacttgaacaaacctcagtgagtcgctcctctgcttcacgcttcgtcaaagactgtcaatatcaaatgtagatcgtgaattaaagttacagaatttatgctactattttgttgaaagagaagaagctcgcaacatttagggtttggctatctaggcttagtaagtgaacaacaatgaatagcatactaaaaggctgttgaattgtccttgttcccatagtggacgaccaaagtacattaccgagcatgtcggtgcatatacggtgtgatcatcttccctacattatgtgctcattgtaatcatttcctatcagaatgccaatctaactttgaaacataaatggctttatgtgtcatcaatggttatagttactagttccaaatgtgcttttaagacacttgtcaaatgcttagtaaaaacaatacatgaaatggtacaatattgatacaggtgggaatgaagttaacagagcacatgggtgtgaccagtttggaggcagatggtctgattctgtctttttctaatgttcatgtcgcattgaatttctattcactcctttacccaattgcagttgttctttaggctgttgtacttggatacttcattacgtgattactggattttggtggtgctttttctcaacatgccgtttccttttctttgagttatcaaagacaggataatgtttatttaacaaatgaagatggggtaatccctcaatgtcacgctaaccttagcacagacagaagcatgttgtttcccgacagaagttatctttttcctaagagcatccactcgccctagtacctgtcatagcactaccaataaaatcacaataactcaagaagtaattgaagaactttcacgacaaatacaattgaaagagttagcaacactgctagttttgacatttgttctgtaatcattagtccagcacttacactcagaaccgggaggggcaacttacataagaacagtaccttttcataatatccctccccaaaggtcaactcgatgagagatctctcataaggatgtaaatctctccttctagggaagttctctgtataagttctcagtggcaccgaaagttcctaaaaaacaaaacagctctcaataaccaagttgaactatttgaattggcagtgcaacaacatagaggacttgccttcattaaggcatcaagttgttttgcacctttgtttctttcacgcttggctatgttttgtatacctgcagaatatatggatcttaaaacaaaataggtgacccagaactgtatgtgaaatgtcatggtagctacaaaggaaaaaatgctaaaatatatgttaaattgaagaataccctttgtgggcggcacatttcttgattttctttgtgctgacataagtatatcagttgcaggcatcaccataggtattctttgaaatgcaccaaccatttcacgcttttgcacaagatctccctgaatgcatatataatagcaaacaaaagaaacttatgatgcatctgatagtaaatatacagtgtgctaatggaagtaacttttgcctagtataactccctccgtcccaaaataagtcgagacacttattttgggacggagggtaacataagaaaatgcaccaagtacatgtcagctcttgaggtgccaagaattaattaggccagaagcagagaaactcagtttcacagcatttgaggtttatatatattacaccattaaccagctccttgttatttagcactgctcaagtataatacagcatcaaagttcttgtagattatgcagcttcggtatgcttaaacgaccccagtgacacccacaaagtaagccccactaggctcctatcatatactccctccgttcctaaataattgtctttctaaagatttcaacaagtgactacatacggagcaaaatgaatgaatctacactttaaaacatgtctacatacatccgtatgttgtagtccatttgagatggctagaaagacaaatatttaggaacggagggagtaaccactaagcaaagcagaaactctggctataaagaaaattcaagtgaaaatgcaaaaaaaaagtagacaatacacatgagactattttttaatacattatacagagaaaaaggatcttaggactttgaggaaactaaatatgaacgtaggtccacatacaagaatcagatcagtcgggtgagagaggttagagtaacaaatagacaccaacaaaatatggtctcaaaacaaaaataacacacaggaatcttggcaatcaagaatatgctaaaattttggttcaaaatgatgactaccaaaatgttaaatagaaaataaggaacaacaggtaagcacactatacaagtacttttttcatgacagcaatgcatgcgacaataaatctctgaatatggaacacgacataaatttcagaaagacatgttcggtgaagggtttgaagaaatgtacatttaatccatctgttaactctacatgtggtctgtcatctacagaaacactgcatgttgcagaatggacccaacgacccaagtagaccgtagaaggccctcgttccaagagttgacaaaaaaacctgagttccaagtaccaaagatgaagacatattcaaaatagcataacgaaatgaatagtttaaagataaatatatctgcatcaacagagtacatattctaaaagtatattcaggctggagaagcttaatgggttctcaatcttcattgccatctaacacctgacatacaattacaatctaggatgaaagaggaagagctacttggattggatgggtaaacaagatctttgcgatcacatataagcaaaaattattagacagaaaccattttcttgcctatggctaatttgtgatggtgtggtttttcagcccattctaaatacaatttgattatgtgcacacacaagcaaagggaattaccacacacaaaaactgataacaaagggttggaataaaatagaaaaataatattattaggtggagaacagcatgctatatatatatgggttatacagccggatttcaaagatttagctcaagacccttctttaaaattcaagaccaggagattattctatatttgaattcctgtgatacgcttagtggttatttcagcatatggttgtcaatggttgtaaagttctatatttagctaattaccatggataataagaataaatgatttaaaatgccacggtctataaaaataaatatgatatgctcagtggttatttcagaataacaaaacaacagagaatattacaaaaatatgaattccagaggtaacacatgtagaagaaaagaatgtgtgcaataaacacaggaaatacacagacaactaaatagtttgaatcgacctaaatagggggagattttttttttcgacccaagtctgcatgtgatttatggaataaggtgcacaattgttttttgtgactatgcaaatgcaactatcaaataaagtgcacagatgtaatttgtgagcagaagttttctattctctcaaaagggggttcgttagtacttctataaaacaccaatacagcgtgtctaccatattcgatacagattcgttcccaacatcccgatatgtatcaatgccagcatcagtgaatacaggcaataaaataaatgcagatacgttccctgatacttccttcatacggtccagcccagtcagagctccgtaaggggcatatgttaaccctagcctaccccaatccctgtgtacagactccaactcttgatcctcttcctccctttcatactcaatcttggcagctagcggcagaccggcgacaagatggtggtgggctactcacctcctccccctctcaggctccagtagcatctcatcaatggcaagatggcattgtgctcctcgcatcctccccgcctcagtctctcagtctccagcagcaggccagaggcagccggcaggcggtggagtgctcctccgctcctcctcctcaggctccagtactgccggcggcgagcttgcggaaagctccagcagtcctgctgcagtgctcctcattcctcctcgcctcctctctgtcgtccctgactccccctaacggcagcaagcagcatcagacggtggtggtgctggtgggctcagggttcctgaagcagcttgccggcagcaacagcaccaacgcatgacttctgctctggtgctccccctcctccttctccctctccagtagagtagctctctctggtcctgtagctcagccaatactgaacttttatgtttgctaacctgctgttgatttttggctgttggtcattggctctccttggaatcatggatagcaaagatagaaacgaatggagtgtactgactaaatatatagtacatgctaaatggctcaatgcggaattgctaacatgtttattattagtagtattattattcacatttacagttcaatgaaatgtacttcagcctaacatgagaacaccgctggctggtctagcaaaaggggactcaaattactggtaatttcgcttctgtataacctcatctcatagtccaagcagtcattttttcccccagcctacatacagaaggcgcctccagtcccaagcgaatctagctcagggggcacgcacgcacaccgttccagagagaacgcgtgcggagaatcagggggctgacctctgagccgtggcggccgggcgggcggagtgcagcggagaggacggaggcagggcgcgcttgtagagcatgacggcggccgccagccccgacgacagcgccggagaggctcgcgctccccgcagcgccgggccggccgccgcgccggagggcagccacgccatggcctcgcacgcgcagtcgattcagcaagctcgcggggagcgggggaagaatggattggtgcggcggctgaacgaagaattttccttttttttttgattggatgaggggaggctggacgaaggagatgcctgtgggttctaggtttccttggcgattctttggatttggacagtgggcctggcccaaccacgtaacccaaaacgccgtcactcacagcgcgcaatatccctatattttactccctccgttcggaattacttgtcgcagaaatggatgtatctagacgtattttagttctagatacatccattttcgagacaaataattccaaatggagggagtacctaaaagaaacagtatactatatcctataaggaaatacacatgagctcttgggtgctcctcgctctatataaatattaaattcaaaaaataccagagaaattaaaaaaaaaaactagaatcttggatatcaaacttaggtgtccaatgtactaccgtgtgaaatttcataaaaaaatgccagaaaatgtatgttggaagaaaatacagtccaacctacgatcaatccaaatagtttttttatacatagatttttttttactgagaatacatctcctgatatttttttacaaaacttcacacggaagtacgtagaatgggcaccctggttagataataccaaaatccctgatttttcttggcagtttttgaattcaattttcataaaaggtgtgaagcacccaggagctccaaatccacttccatatcctatatacctaaagctcaatccccactaacttatttatttcaacatgcaaacatgccacctcatcatacaatcatgaattggataaggaccaactcagcatgcaatcatgcatgcgaaaaggcccaccaaaacattcaaccatgcaagcaatttatttaattactccacttatattcaataaatattattacaactacacatactcaaatattctaaattttggttctcatgttatcaacccaaaatagcatcaaccaattccagccgtaacgcgtatggtttcctctagttattattgcgcacccctaaaataattgttatttgcttccctcaaaaaataaaaagctacaacactattattgcgcaagagatatttcccacggtaaatcttatttggcgcgtacactccactccccgctacgtacgcttaggccgacccaactagctccttttcagttttgccaaggttctaaaccttcccatacggttttttcctgttttttctttctatttttctgattttgttcatttatgttttttcctttatttttcatttagttacttcttttaattttacattttcgtttatttcatgtttgtttttccttttccactctcattttttctttctttctttattttttcaaacatatttaaaatttatgaacaatttctgaaatcaagaacttttttaaaatcatgagtattttccaaaatcgtgaacattaatttgaaattttaaaatttgccaaatttatgagattttttactaattttttaacattcttaaagtcgtgaaatgttttataaactgtaaacaacttttaaagtcagcgacatttttttaatcagaaaatattttctgaatagctgaacagttttcgaaattcatgaacttttttgaagtgcatgaacatttttttgaatcatgaacgttttatggatcaatggacttttttgaattttacgaacaaattctacacgagtaaattttgaattttttacgcatttttaaaaaaaattatgaacttttgtttaattcgcaaacaatttctcaaattcatgaattttttaataccctaacatttcttaaaaatcatgagcattttttattttcacaaacattctattcgaaatcatgagagttttttgaataggtgaaaaacaattcaaaatcacgaacattttatgatttcttgaatattttttcagaagcaaatttcttttgaaatttcgacctgttttgaaatactgtgttattttaaataataaaaaggaaaaaaacatggggcgtaccgccccacaaaaagggcacgcgggggagcggcgggtgcgtgtttcacatatttttcaaggagctcccattctctcgcttgggtcgagatgtagttgttgtaaggtggtctggacgcctcaccctgtttcttatatatgtcgaatgtatacgagtgggtgattatttcacctctgtactaaacgcgagaacgaggcctaggaatgggttggacccatgacattccagtccatgactataaccaaacacacctagctaagctcctagggaatagagtcctcgtagagctccaatgtttttttgggaagtgggtccgtttgtatcagggaaaaaaggtgttgatgactgacttactttcacatagagcgatttcacagccgttgcggcggttgtgctgctgcatgtgggcccatgcttaatcggtcagtttgtatccagtctagctccaactcttcttgccccggctgtgcgcctactccttcctattcttctccttgcacccaactcactcttgtgcccttccgagctgtcgctgccccctccttgatgcctcacggtcccctctccctttctctttctgagcgacaacgactggtgggattggaggtggtgttggaaatatgctctagaggcaataatattgtattattttattttcatttcataatcaagagtttatatttcatgttataactgctataatcctgtaatatgtgcgattcagtggaaaactcatatgcacgtgtgaaataataaacattaaagaataggttcctagtcttgcctctaagactggctcaagtgttgttgatgctgatgtttccggatcttagcatatcgttaagtgtaatgatagttgtaaaacaacattgagagtatgacgttagaagaacgatcatattgaacgatcatattaaatggacccaaacttgtttgttatactttcagataatatcgattgaaatcaactgttataacatggagtgttaacatgtgttttagtttctcataccatatgagagtatcgtagtcacttccctccgtacggtgaactttggggttgctgaaacatcatctgtaacacagtgatcataatgacaacttataggtccatcagaaagtttgacaagggactagatagctcgagaatgggatttgctcctctgacgatggagagatattcttagggccctgatatgtctcaaacgtgtatataattttggatgttttatatacatttacaagcaattatatatcattttttggactaacctattaacttagtgtccactggtagttgctgtttttttgtctgtttttttggtttttcagaatatcagtaccaaacgagatccaaatgccatgaaactttttcgagattttttatggacataagagcccatgcgaaagcttcaggatgggatgataagatgtaatagtggcccacgaggctccagggcgccccaggggatagggcacgccctagtggctttgtggggcccacgtggctccgtttgacctaactccgcctctataaattctcaaaaatcaagaaaccaaaagcggagtaaatgaaatactttttttgccaccgcaagcctttgttctcgagatatcccatccggggggccttttccggtactccgccggaggaggaatcaatcgtcgatgccggagcttgcccgcgtcgcaccgtgctggggctggagcactcccgcgccacgccacgctggagcattcccgcgctggggctagagcccgcccgcgccggtgccggagctcgcacttgccgcctcgcgctggggcttgaggactgccggtgtcaaaaccggcagatctcgggtagggggtcccgaactgtgcgtctaaggtcgatggtaacaggagataggggacacgatgtttacccaggttcgggccctctctatggaggtaataccctacttcctgcttgattgatattgatgaatatgagtattacaagagttgatctaccacgagatcataatggctaaaaccctagaggcctagcatgtatgactatgataatgagtatccgcctatccggactacgctcttcggtttatatagacaccggagagatctagggttacatggagtcggtaaaaacgaatctacatcattgatcgccaagcttgccctccacgccaaggagagtcctgtccggacacgggtgtagtcttcgtatcttcacagcccatcagtccggcccatggctaacagggcggacgcccgaggaccccttagtccaggactccctcagtagcccctgaacctggcttcaatgacgaggagtccggcacgcaaatttgtcttcggcattgcaaggcgggttcccttcttccgaactccagaatagtcttcggacgtaacggttgtatccggacctgttcttataaccgcagagagtataatatttcacgagtccaacctgctgacaactttttgcgacacatcaccatgtctgcttggtgattatttcgaaccgtttttcatctgtcgttccgtgtttcaagacacagttactattgacacgtcttgtcgaagcagagatcgtgtccccttatcatgggattctcatcaatgcaggcgtgggtaatccaaccgtgccgtttacacaaccctagggaacaggcaaatttcatggcgagtggggaggcgcttgttatttcacggcctttataaggggatgaggactccctttcctcacccacgccatccatatctccgtcctttcgtcctcaagctccagcgcccaagttctcatctttctctatctctggaagcatacagccatgtccggatccggaggccaaggcaagtggatggcctcctctgtcaaggagaaggacatcatccagcttcgggcggccaggtatttggtgaaagagatcgcccaccgcctgccagaaaaggggcaaatcatccctaccccgaagccctccgagagggtggttttccttcctcacttcatccatggactagggtttccccttcacccttttgtccgtggattgatgtactattatgggctagatttccgatctaactctgaactccttcctcaacatctcggtgttcatcaccgtgtgcgaagccttcctccgcattcatccccactttggcctatggttcaagaccttcaacgtgaagccaaaggtggtggatggtcagcacacagagtgcggaggttccatggtaagcaagatgcccaacgctacatggctcaagggaacgcttgtggattccgtcaaggggtggcaaaaatagtggttctacatcacggagctacgcgacgctacttgggcagcgcctcccgacttcaagtccggggctcccatgcggctcacctcttgggtggagaaggggcccaactggtcctcgtcggacgaactaatagtactgcaaacgcgcattcagagcatggtggataaaaaggtcaagatcgtcgatgtgatccaggtaatgctggtccgtctgatcctcccatgcaaggaccgagctttccccttatgggaattcaatccggagaatcaccggaccctgaagaggctcttcgacactacacacgaagatgcctggaagtcgctcgttaagggcgatgagacgccaccggcccggaattcggaccgcgggcacgaccacaccaaccctgctagcaaggtgagctttcacttctcactaaaaaaaagacacatccgtgacattttgggctgaacgaattttttttctgtcatacatatgacacttctatgacgataattgtgaaaaaacccggtatcatcatagatgtggtgggctcctacttctatgacaaaaaatcatgacagaaaatgggcttttcgtcctgggcgggccggagacacaactgcatgacattctttgggccttccatgacgaaaaaaaccgtgatagaagcgagggcgaggaaaatttcggggagttcccggttactgtgggaggtcgggggccgagcgatgcgcgtttctctcgtacacgtacgcgcgtgtgtgcgaggcgttggctctaactgaacccgagcgaggcgttgggctctaactgaactcgagcgattgcactgcaggctacgcgttactgaacccgagcgagcgattccttcgctactgctgctaactgaagccgatcgattggatgaacagtgagcgttgcgggggtgggggggggggggg

SEQ ID NO: 20 - DNA, 53213 bp, Artificial Sequence
  Scaffold 1898148
  misc_feature (1)..(755): n is a, c, g, or t
  misc_feature (1850)..(1974): n is a, c, g, or t
  misc_feature (2105)..(2164): n is a, c, g, or t
  misc_feature (3865)..(3908): n is a, c, g, or t
  misc_feature (4582)..(4673): n is a, c, g, or t
  misc_feature (6768)..(6796): n is a, c, g, or t
  misc_feature (6802)..(7062): n is a, c, g, or t
  misc_feature (7255)..(7280): n is a, c, g, or t
  misc_feature (7414)..(7582): n is a, c, g, or t
  misc_feature (8861)..(8899): n is a, c, g, or t
  misc_feature (9128)..(9895): n is a, c, g, or t
  misc_feature (9920)..(9980): n is a, c, g, or t
  misc_feature (9985)..(10125): n is a, c, g, or t
  misc_feature (12907)..(12954): n is a, c, g, or t
  misc_feature (13272)..(13301): n is a, c, g, or t
  misc_feature (14856)..(15679): n is a, c, g, or t
  misc_feature (15952)..(22308): n is a, c, g, or t
  misc_feature (22598)..(22819): n is a, c, g, or t
  misc_feature (23782)..(24148): n is a, c, g, or t
  misc_feature (24538)..(24634): n is a, c, g, or t
  misc_feature (24645)..(25728): n is a, c, g, or t
  misc_feature (25861)..(26056): n is a, c, g, or t
  misc_feature (27756)..(27818): n is a, c, g, or t
  misc_feature (27941)..(28005): n is a, c, g, or t
  misc_feature (29773)..(30039): n is a, c, g, or t
  misc_feature (30067)..(30095): n is a, c, g, or t
  misc_feature (30184)..(30585): n is a, c, g, or t
  misc_feature (30761)..(30836): n is a, c, g, or t
  misc_feature (33485)..(33513): n is a, c, g, or t
  misc_feature (35134)..(35172): n is a, c, g, or t
  misc_feature (42001)..(42139): n is a, c, g, or t
  misc_feature (44772)..(44809): n is a, c, g, or t
  misc_feature (45947)..(45966): n is a, c, g, or t
  misc_feature (46404)..(47443): n is a, c, g, or t
  misc_feature (47482)..(47829): n is a, c, g, or t
  misc_feature (49801)..(49848): n is a, c, g, or t
  misc_feature (50632)..(50718): n is a, c, g, or t
  misc_feature (51127)..(51214): n is a, c, g, or t
nnnnnnnnnnnnnnnnnnnnnnnnnnnnnnnnnnnnnnnnnnnnnnnnnnnnnnnnnnnnnnnnnnnnnnnnnnnnnnnnnnnnnnnnnnnnnnnnnnnnnnnnnnnnnnnnnnnnnnnnnnnnnnnnnnnnnnnnnnnnnnnnnnnnnnnnnnnnnnnnnnnnnnnnnnnnnnnnnnnnnnnnnnnnnnnnnnnnnnnnnnnnnnnnnnnnnnnnnnnnnnnnnnnnnnnnnnnnnnnnnnnnnnnnnnnnnnnnnnnnnnnnnnnnnnnnnnnnnnnnnnnnnnnnnnnnnnnnnnnnnnnnnnnnnnnnnnnnnnnnnnnnnnnnnnnnnnnnnnnnnnnnnnnnnnnnnnnnnnnnnnnnnnnnnnnnnnnnnnnnnnnnnnnnnnnnnnnnnnnnnnnnnnnnnnnnnnnnnnnnnnnnnnnnnnnnnnnnnnnnnnnnnnnnnnnnnnnnnnnnnnnnnnnnnnnnnnnnnnnnnnnnnnnnnnnnnnnnnnnnnnnnnnnnnnnnnnnnnnnnnnnnnnnnnnnnnnnnnnnnnnnnnnnnnnnnnnnnnnnnnnnnnnnnnnnnnnnnnnnnnnnnnnnnnnnnnnnnnnnnnnnnnnnnnnnnnnnnnnnnnnnnnnnnnnnnnnnnnnnnnnnnnnnnnnnnnnnnnnnnnnnnnnnnnnnnnnnnnnnnnnnnnnnnnnnnnnnnnnnnnnnnnnnnnnnnnnnnnnnnnnnnnnnnnnnnnnnnnnnnnnnnnnnnnnnnnnncctgtttctccttgcatcacatccaagatgtcgagaaccttggcgtgtttcagtccgtttttcttaagatgacatttgtgctactctaatggtgttctttatggtaaatatgcaggttaatcaggccatacaagtacttcatactaatggttccagaacttgagggtggtgatgtttgggcaagggaaaatatccaagttcatccggatcgtctaactcaaaaaagagatgctattaatgtttggcaaaaaaagaaaaggtagcatacctccaaatgtcctatgtttccttttccttccttgggatgtttctgacttttggatcaatatattgtaggctgataagaggaatggtgtagatagtggatgcttattgattaggtagttggatcaagcaaattgagatgaataaatggaggagctggtaagaatttcacgaagatgactgtattccccttctggtgttacattattatatcgttttgatctggcatcttatcagaaaattattccgatgctttagatcatgactcatgaggaaagagaatactatggagcatgagacaatttctttaaaaaagagaagatttttcattgaagagattaatgaactgaaagcccaaaggaagcaaaacttttccaatatgggctcaatgtctgaagcattccatctatggggtcacatgcattgatgacataaggtgttatttcgaaagcaacatcttgttattctcagtttgtgtttcatcaaattccatgctgacccatgctctgctttctatgctttgaaggaaattggttaaattttcaaaaatatgaagtcccttgatgagaacagaagaatgattcaaaaatcctccgaggatgagagagcagttctagaaaaattaaattatgaactgtatctgctaatggaatatctcaagaggcctactgtaaaaatgtaaggaacttctattcaagataggcttgtgatgttcattctgtagtgctttttttcaggttactgacatagataattccttcccaagttgtacaccatccataaatcggaggcttattgtcaggttataaataatgagatagaaagcccaannnnnnnnnnnnnnnnnnnnnnnnnnnnnnnnnnnnnnnnnnnnnnnnnnnnnnnnnnnnnnnnnnnnnnnnnnnnnnnnnnnnnnnnnnnnnnnnnnnnnnnnnnnnnnnnnnnnnnnnnnnnnccttggcgagaacctgagtggtattagttccaaacacaactggttacaccgattaatagattgactatgtttatttttttcacctgaaaacagtaaggcacatgaccctactattattttttattgcatannnnnnnnnnnnnnnnnnnnnnnnnnnnnnnnnnnnnnnnnnnnnnnnnnnnnnnnnnnngggaatgagaagaaaactagaatctacataaggcgactgacttcatgttagcagtaaagtaactctttcagtgtcatgatttcatcagttttacaaagtgtgcaacttgccatgctatctattacgcacctgtaccccctgtaccgctgatgatgatgaggcagggaaggtaagtttcctttgtttggagaaatactatgtggtatgctacactatgttcactgtctgtcttggtgatgactgatgaagcagggaaggcaagtttcctttgttaggaaatatatactattcgtactatggtagtggctacaaatacacattcgcaaccacatcaaagaagaagatggcggccacgcatggaacctgccacatgcatgggagcgcactagactcgtactaatcacgaccacagcgaggaagaagaaaacaaccctagagttgctcacattagagtccatggatcgccgccactctgaccaccaagaccacgaggccataccatacctgtgaatgatgttggcaacatacacggccaagctggttcctacaaaggaaaatagaacagcgtgtgcattttagcttgtcgctaatttaagttttctccatttgcataaagttgtactgagaattagacactcgactcttcagttggttcatgcatattggtaaaccggagggccctacagatgttcatgtgaacctttctgctcttcggaagcttgattccatgctaatgctaattgtgtgttgttctcactgaattaatcttaccattatatgaatgtgcatatccaacatagttaccatcaatactgaaaaaaatgatctatccttttttgtatattgaatatattatgcgtatttgcaacaatttcgatatattaacataaatgtaacaaaatatgcaggaaaatcagaactcggtgatggaaacaaactattgctagctggagactttcagccaacctggtgcctgagacaaaataatggtcaaagacaacaaagaaagtggaggcacccgtccttgtttttcaggctaaaggtgttcatcaactcttcaaagctgcaaagtctgacatgaacaagtcctgcttcagataacctcacaatagttggtcatacttctggtgattcatgcattgctcataatggatactagcttagccggcgcggcgacacgccgcacctgtcgataagtcgcgactatgtaaactgtggtccaaacaatagagtaataaatagttattcgttgtcaattaaagagaggcataacaatatgtaaaagagttgaatatgacaacattatttattacaaccatgcaaatgcatggtcacaaacaaagcggtaaacattggcacgcctctaataaaactatttattaaaaccatatgcagttcacgctatataatggcccgtatacgggatactaacgtactgcagtaagaagtcgcaaagatcattctgatatagcctctgcaggattactgttgatattggtgaactaaccatgcgccgtggacgccctcggtcctttgacgacgacctcgataggaagctatctaccttaccttacttgaggacgctgttcagtccctgcctccatggtccctgcaggtacactacaccgtgccgttcgcatgcacggccgagaacatgtgctggtacagaacctaggtgccttgccgaggtccctgatatannnnnnnnnnnnnnnnnnnnnnnnnnnnnnnnnnnnnnnnnnnnggagagagaggagacagatggccagcgccggtaatagagatggggacctggcagtggcctccggcaaagaactgccgtgggcgcaaatgaaatttaagagacggacgcactatgcacggatgagcggtagaagcgagatgagaaccattgatggagaaggcgagcccttttatggaccagtacgacggtgaaaaggtgtgcaggggaaaaaatccagcgtcgagaggcatccagattgcacgaaatcagcggtggccggcacgtgagaatttgcatggagcacgtggtcacatcattctacaggaacttcctatatacactgaaaaaagaaaaatatagaacattagcgtgagtttcaattatcaaacgtactcctgttatagtttgcgcatgagagcgcaatacaaacattaagtagaacaacatacctgcatatactacaacctttttactaccataagcacatcataatttccaagagaactatatccattagaacgttttgtacttgatactgaaacttagcaagagagttgaaacaacactggtatcactaaaaaacaatactttattgcctttttttttggaacaacacttcattgctgatgacattttgttttaaccatctgccgaacaaatataataatttctcaacataaatctgaaaggagctnnnnnnnnnnnnnnnnnnnnnnnnnnnnnnnnnnnnnnnnnnnnnnnnnnnnnnnnnnnnnnnnnnnnnnnnnnnnnnnnnnnnnnnnnnnnctttacaattctaacccccttcataactggttggatagttattatctgctctagcatgaccaaatattagtcaaataaatcatgcataatattaaatcacaatggaaactttgagagggggaataaacttatcaacatggaacaatacatggcaccagatcacgtgcatggatatgctaactttgacagggaaataaacttatcaacatgaaacaactatttggactgtcctttctggattaccgcacctcgtatgtcaaacaccctacaattttaatcagatatatacttgacatgctttagattccaagtacagtttagacataatataaagctacagctaggtctagcgctactaagcaactacgaagtaataattaatatgctggacgtccctgctgcatgtcgacgaagaacttgtacacggtggccttagcctccatacacttgcgcagcgttgcttccgccttcgcacgcctccattggcggcatcttccgagagccgattctgccgagctcacaggccgccggtcaggagaagatgacgacgacgacgattcaccctgcacaacacagatcgttcacattgttttgcccatgacgacgctgataggtggtccaactatcgtgggcgtgtagattgtctctggccgaaactatgaatgatttacgcacgtacgtgcacctttcgcttgtaagcgccggcggattggcgggctcgaagacaccacacatggtcctacgccgccctggaccgcgctcccaccacgactcactcatgacgtgcacttttcgcttgtaagcgccgacggattggcagactcgaagacaccacacatggtcctatgccgccttggaacgcgctcccgccacggttcgctcataatgctccgcctccgcctcggcgagctccacaccacgaaccgtggcctctcccagtcatcggccacctgccccaccacctccaagcactgccacaccacgctcgcacaggtcaggaagaagcaatcgctcctttgccacatatatgcaccatggctgcccgggcgccatacgtcgcgggctcgcggccctccatggtgccgtcgtcgttggggtgggcataagcgcacgaccaccgtagctgctggcctgctcaatcccgaatcgccctcgagccactgcaatccgaggcgctctgcgagagatcataaataccaaggacgcgtcctcaagcctctgaaattcatgcgacagatgatgtacggcgacgccgagggcgtcatcttcacatcctagggcgacgcatggcggcagcttcgcaagatatgcaacccctcaagattgtgctccgctcctgccgcgtccagtccttctgccccgccgacaaggaggagctcggccgccttctccacttcatcgccccgaagtcggcctcgtcttcgccggagaacctgccttaccacacatcggtgtacgccgtggactccatggagcgcgccatcgtaggcacaagttcaagcagctagatacgcacctgaagggggctaaggacaggaagaaaccggggcaggatcgagccttggtctcgactgcatcagcaagcgcgggtcagtgatcgacatccatgacggcggcagcaacgacgcttcctgccatggtgtccccgtccttgcgcaccgtgtccaagatcatcatcaggaacaccggggcgccgctcttcgcgtctcctcgccggccacatcacgtacctcccaaagcttcaccaaaagacggaggcgtgagggcggcactaggaggtgaattaccagaactcggcggcgcggacaggacggggaggaggtgaaattcatcgccaaagcctcccccattaatgcaaaacgatcaggtaaatacaaacgcaactgagcaggtaccatataccgcgatggaaggagcagcagcaggaaacgcccgtatttataggagcctcgagggaaagctaattcgaacacgatcatgtggacgcgaaacaaccagagcacgcgattgaagcggcaaccgcctatgtacgtgagacaaactatacacgtgatgcggatggaaaccaaattgtaaacgaacgctaacgtggcannnnnnnnnnnnnnnnnnnnnnnnnnnnnagaagnnnnnnnnnnnnnnnnnnnnnnnnnnnnnnnnnnnnnnnnnnnnnnnnnnnnnnnnnnnnnnnnnnnnnnnnnnnnnnnnnnnnnnnnnnnnnnnnnnnnnnnnnnnnnnnnnnnnnnnnnnnnnnnnnnnnnnnnnnnnnnnnnnnnnnnnnnnnnnnnnnnnnnnnnnnnnnnnnnnnnnnnnnnnnnnnnnnnnnnnnnnnnnnnnnnnnnnnnnnnnnnnnnnnnnnnnnnnnnnnnnnnnnnnnnnnnnnnnnnnncggtcgaacacgcgagaaaaacgaaccgacctcccgacggaaacgcacgtcatgcatgcacagcaatgcgtggaaagtacagaggtcaactgggatggcccacgcatgccgaaaacgctaggtgcacacacgaacatgcagtccacgttaagaaaatttacaatggaaacctagagccacatgtgatttctannnnnnnnnnnnnnnnnnnnnnnnnngggtcccaaataaatacacgtggctgcaacccacaacttctcaagttgctttcacccaagtggtgaaacgtgaaggcaaaaacttggttagatatagaggttttggtattcacaaagaatcttgataggggggnnnnnnnnnnnnnnnnnnnnnnnnnnnnnnnnnnnnnnnnnnnnnnnnnnnnnnnnnnnnnnnnnnnnnnnnnnnnnnnnnnnnnnnnnnnnnnnnnnnnnnnnnnnnnnnnnnnnnnnnnnnnnnnnnnnnnnnnnnnnnnnnnnnnnnnnnnnnnnnnnnnnnnnnnccatattgttacaaaaagtttcataatagtttgtctttttttatattgaaaaaaatatgtcttcgattagggtgcccctagacccatattctattgggtattttcgtattgtttgatgaccatatatttttgttcttctatttccaattgtttgatcattatatatttttgttctcccatagcaacgcacgggcgttcaactagtagggctaaaagcagaattcatctctttttttactgccacgaggcgggcaaagtggcttgcagctttcatggcaccgttgcttgcaccaagctcagcctcgagggcatcccggcatgaaaaaaaaaagctctacacgaggaaaaaaatagtcaagccacgttcgtcacccaacaccatgcccccttccttacttaatcaagatggcaagtctttgcttccgccaaaaaaaaaaggcaggtcttggacgttgttgtttcattatcaaccgaacggaaggggcggtgggggcttagtggaacagctcgaacataagaaaatataattttacctagccggccggtgtgaagagcacttcgaacattttgcaatttccattttcagggaggctcgagcttcatatggtagttaggggtcaacaaacgaaataaaatcgacgacgcgactttctcagacatcatataatattttggagcagctgtaatgtaagattgagtttttattcttgtgagctgataagattgtgtattattagtagcaagtttttcttttcttttttagtatgacaatccgtgctgtttgaagcgttctcgcgccgttaattataggctccactagccagccaccaagaccaagtgtcactagtatattatcggcgactcacctactcctactcgatcatcacatgctggccggccgggccatggagagctagcttgcccggtctcgcgaccgacgacgcgcgcgcgctatataatcataatcagcgcggttggtgtggcgtgtctgtgagagggggaaggagaggggaggcaggcgccacaatctacgaggcgcgatctgcagagagcgacgatgaagaagcacaccatccaagtgccgccgccgcggccgtacgtcgtcctcgacgccggggaggacccggaggaaagcgtcgccgtgcgcgcgccgctcctgcgccaggtacgtacgcgccgtacgccccggccgtgggctagctagctccgtcatccctcgatccctttcgttttagcttgcatgtgtgttcacacttcagagtagaattaatcatcttannnnnnnnnnnnnnnnnnnnnnnnnnnnnnnnnnnnnnncatccatacaatcaaatttcaagagttatagcaaataagatagcttggattaatcatcttaaaataggctttcgcttcgctttattataaataaagcaaacatccatacaaccaagtttcaagagttatagcaaataagacagcttgggcaacaacacaatctaccaaaaatataaaaaataaagaaaaatcaagcggcagtctggacctaatcggtcagtcatgagcnnnnnnnnnnnnnnnnnnnnnnnnnnnnnnnnnnnnnnnnnnnnnnnnnnnnnnnnnnnnnnnnnnnnnnnnnnnnnnnnnnnnnnnnnnnnnnnnnnnnnnnnnnnnnnnnnnnnnnnnnnnnnnnnnnnnnnnnnnnnnnnnnnnnnnnnnnnnnnnnnnnnnnnnnnnnnnnnnnnnnnnnnnnnnnnnnnnnnnnnnnnnnnnnnnnnnnnnnnnnnnnnnnnnnnnnnnnnnnnnnnnnnnnnnnnnnnnnnnnnnnnnnnnnnnnnnnnnnnnnnnnnnnnnnnnnnnnnnnnnnnnnnnnnnnnnnnnnnnnnnnnnnnnnnnnnnnnnnnnnnnnnnnnnnnnnnnnnnnnnnnnnnnnnnnnnnnnnnnnnnnnnnnnnnnnnnnnnnnnnnnnnnnnnnnnnnnnnnnnnnnnnnnnnnnnnnnnnnnnnnnnnnnnnnnnnnnnnnnnnnnnnnnnnnnnnnnnnnnnnnnnnnnnnnnnnnnnnnnnnnnnnnnnnnnnnnnnnnnnnnnnnnnnnnnnnnnnnnnnnnnnnnnnnnnnnnnnnnnnnnnnnnnnnnnnnnnnnnnnnnnnnnnnnnnnnnnnnnnnnnnnnnnnnnnnnnnnnnnnnnnnnnnnnnnnnnnnnnnnnnnnnnnnnnnnnnnnnnnnnnnnnnnnnnnnnnnnnnnnnnnnnnnnnnnnnnnnnnnnnnnnnnnnnnnnnnnnnnnnnnnnnnnnnnnnnnnnnnnnnnnnnnnnnnnnnnnnnnnnnnnnnnnnnttatactccctcctccggtaataannnnnnnnnnnnnnnnnnnnnnnnnnnnnnnnnnnnnnnnnnnnnnnnnnnnnnnnnnnnntatgnnnnnnnnnnnnnnnnnnnnnnnnnnnnnnnnnnnnnnnnnnnnnnnnnnnnnnnnnnnnnnnnnnnnnnnnnnnnnnnnnnnnnnnnnnnnnnnnnnnnnnnnnnnnnnnnnnnnnnnnnnnnnnnnnnnnnnnnnnnnnattacgaaatagagagtaaatcgcctgcatgctttctcaaacatcatgcagtaaaatatgtatttgcgaacaactgtagtgtaagattgcatttttatttttgcatttttatttttgaactctttttgcatggtaatatgtgtttcattcatatcataaaaattaaagtacaggtcacataaagaccgacatgacaaaactgaaaaggcaacaaaatctctctgagcttgaaaccaacacccgtcatccgcctctgacaccaccaaagcagacaccgaaagaaaaaatgacggatcactcacccaaactcaacacggctccatcgctgatatgcagctctgcggaccttcaaggtggctcgccatagacaaaaccattatcgttgagcccgtcatctgcctctggcaacacctcggacatgtcatcgaactctagatctggcacccccacatgactaaaactccggacgaggaaaccatacctatcatccacgaaccacgagcccaacacacattccgtcttaaacatcatctatgcagaccacaatctgcatccgttcctcgactacctcccaagcctcgcgccaacgttgaagcagacgtcgtcgcaacggcggggcccgaggacacatgtccaccacaaagatgccgccgccaccacaacaaccccgcttgaacaggctggttccgagatccttcaccgacaatagagacaatcgcctcactggagaagaatccggagcttctttattcagcattgccgttgccgccgtcaaaaccaagacgtcaaatgatccaaaaccctaagcttcttgggtcctaaaaccaaagctaaaacgatccacatgcgcgggatctggcgacccgccctcaccacggacgaccataaggtcactgccggaggagagccgccggaagacggggctggtggcggcggctaggttgaaggaaaacgatcgcagaaccgtatggttctctatttttatttttgaactggtcaggtcgagttagtagtagtaaatattttttgagtataataacagtccgtggcgtttgaagcgttctggcgccattaattaggcgccactagccagtcacccagacccagacccagtggaactagtctattcccggcgagacggcgatcgacccacctacccctgcccctgctggatccatcacatcctggctgcccgcgccatggagggctagcttttgcccggtcccgcgaccgacgacgcgcccgcccgctatataaccagcgtggttgctgtgcgtctccgtgagcgagcggggagctagagaagaggaggcaggcgccacagtctaccagcagcgatgaagaagcacaacatccaagtgccgtcgccgcggccgtacgtcgtcctcgacgccggcgaggagccggagcgaggcttcgccgtgcgcgcgccgctcctgcgccaggtacgcacgcacacgacgcccccgccgtgggctagctagctctgcatcgtagtaccttctttcttagcttgcatgcgacttcagttgagagtatagagtcattcatcgatgatcgcccgccggttccggtgttctgatcagcttgattaattgcttcgatggtcaactcatcggcttctcttgagattggggataagtttatacgactagttcaatcaatccatgactgtcaatggcgtgcgtgcgtcggaactgaattagtatgcatgcattttttttacgggcaattgaaatgtagcaaccatggactgagtctaaagctcatcacgatcaagtttgattgactatgtgcatacacattagctacacatcaccatcagttggtggatgcattgaggaatcaatgttgggtactacgcaggatcggacggtagcgaaaagaaaacaaacacaaaaacaagtacaaccagcggtacatcggtccaaaaggctgacaactaagtaggcatgctttacagtttgtctctgttaattaaactgattaagggagtatttagaactcatttagctgagatataatttggtcttatttactttgaaaataagaacagatacaacccatgtcagcacgcacgcatcttacagcatcacatccaatggctataaaaggtgaatgtgaccaaattatatctggtctagatgagttctagcaaaactaattaaactatgcggatcatggcggctagcactctgcaatttggctctactttcatcatcatgctgcctattaaaatcatgatctttccacttaacacgtgctacataaaaatatgttcagagatacgttcatttctgcgtgccagctattagtattttttttctaataagcaaatgcgtatcatagctttatagaagaagagaacaacaattaccagactaattaatttattccctcaagttatgcaatttgtccagtgtcatgctcctactactattgttcctctgctgctcttcggattcggcttaatttctcactctgtttcttcttggattggaatcatgggcagctcacctaccgttcgtctccgtcgttcaaacgatccaagagcagcctcgcttcaccctccttctcggcgtcgccctccttctcggcctccccttccttctcctacttggcctcccccaggcccaggctcctgccttccccgaggatcaatgaacacgagaccctgctcgccatctcctcgccgacgatccaagaggaggccccgctaccgccgcttctcgacgaccacaacagacccagcagcaaggcgccattcgtggtgctaggtgannnnnnnnnnnnnnnnnnnnnnnnnnnnnnnnnnnnnnnnnnnnnnnngctcggctgaatgatgattattactaaggtgtttgatgcaattgtggtggtggtggtgcagggttcgagtgcctggagagcacggcgttcaacggcatctccaccaacctggtggtgtacctggagacggtgctgcacgggagcaacctggcgagcgcctccagcgtcaccacatggatcggcaccagctacctgacgcccatcttcggcgccgtcgtcgccgacacctactggggcaactacaacaccatcctcgtctcgctcgccttctacctcctcggcatgatcctcgtcacctcctcggccttcctcccggtnnnnnnnnnnnnnnnnnnnnnnnnnnnnnngacgggcttcttcagcgccaagacgctggcattcgtggggctctacctggtggccatcgggagcggcggggtgcggtcctcgctgctgcccttcggcgccgagcagttcgacgacgcggtggtgaccgaccgcgagggcaaggcggccttcttcagcctcttctacctctgcgtcgacttcgggcccatcgtctccggcctcctcatcgtctacatccagcagaacgtcagctgggcgctggggttcgggatcgccaccgcctgcatcgccgccgcctacgccgcattcctgctcgccacgcccatgtacaagcgcaccatgcccaccggctcgccgctcaagagcctctgccaggtcgtcgtcgccgcctgcaggaagctcagcctccgcctgcccaccgacgccgccctgctccacgaggccagcgacaaggacgacgagcccaggatcgcacacaccgccgagttcagcttcttcgacagggcggccgtctactcggagctggaccttgccgagaggatcgacggcgagccgggctcgtcctggaagctctgcaccgtcacgcaggtcgaggagctcaagatcctgctccggctcctgccggtctggacgaccagcatcatcgtctccgtggcctactcccagatgaacaccaccttcatccagcagggcagcgccatggacatcaacgtgctgtccctctccattccggcggcgtcgctgctctccttcgaggtgctctgcgtgctcacctgggtgctcctctacggctgggtcatcgtgccggcgctcagcaggttctccatctcctcgggcggggagccatcgcagctgcagcggatgggcgcgggccgcgtcctcatggctatctccatggccatcgcggcggtcgtggagacgagccgcctcggcagcgcggcacgcggcgagcagatcagcatcgcgtggcagctgccgcagtacttcttcctcgccggcggggaggtcttctgctacatcgcgcagctggagttcttctacaacgaggcgcccgacaccatgaagagcatgtgcacctcgctcgcgctgctcaccatcgcgctcggcagctacctgagctccttcatatacgccgtgattgagctcctgacggcgacggcggacagccccggctggatcgccgacgacctcaaccaggggcacctcgactacttcttctggatcatggccgccatctccatgatcaacttcttcgtgtacagcgccttcgccaggaactacaagctcaagacggtcctctcgtgatctctctgtttgtttgctctgcttttttggtccttgttaaacttgagtatttcattacacacaccgcacaatggcgagtatatattattgtatccaagcatcgtgtacatatacaggaaacatatataagctcaagggcattttcaggatgagtttgtatctatctaggcactgctcaaaatccaagtaaaacaaatacccaatgcaaaaaaatattcttcgaaactgaagtaacttcagagttcagactttgtttcctttttcttttcnnnnnnnnnnnnnnnnnnnnnnnnnnnnnnnnnnnnnnnnnnnnnnnnnnnnnnnnnnnnnnnnnnnnnnnnnnnnnnnnnnnnnnnnnnnnnnnnnnnnnnnnnnnnnnnnnnnnnnnnnnnnnnnnnnnnnnnnnnnnnnnnnnnnnnnnnnnnnnnnnnnnnnnnnnnnnnnnnnnnnnnnnnnnnnnnnnnnnnnnnnnnnnnnnnnnnnnnnnnnnnnnnnnnnnnnnnnnnnnnnnnnnnnnnnnnnnnnnnnnnnnnnnnnnnnnnnnnnnnnnnnnnnnnnnnnnnnnnnnnnnnnnnnnnnnnnnnnnnnnnnnnnnnnnnnnnnnnnnnnnnnnnnnnnnnnnnnnnnnnnnnnnnnnnnnnnnnnnnnnnnnnnnnnnnnnnnnnnnnnnnnnnnnnnnnnnnnnnnnnnnnnnnnnnnnnnnnnnnnnnnnnnnnnnnnnnnnnnnnnnnnnnnnnnnnnnnnnnnnnnnnnnnnnnnnnnnnnnnnnnnnnnnnnnnnnnnnnnnnnnnnnnnnnnnnnnnnnnnnnnnnnnnnnnnnnnnnnnnnnnnnnnnnnnnnnnnnnnnnnnnnnnnnnnnnnnnnnnnnnnnnnnnnnnnnnnnnnnnnnnnnnnnnnnnnnnnnnnnnnnnnnnnnnnnnnnnnnnnnnnnnnnnnnnnnnnnnnnnnnnnnnnnnnnnnnnnnnnnnnnnnnnnnnnnnnnnnnnnnnnnnnnnnnnnnnnnnnnnnnnnnnnnnnnnnnnnnnnnnnnnnnnnnnnnnnnnnnnnnnnnnnnnnnnnnnnnnnnnnnnnnnnnnnnnnnnnnnnnnnnnnncgaccctttcttttttaatctcttgcatcgaattgttctagttctgtcccatgaaaaagttcgccacgccatgcattggaccaaggttttggattttggacggcaaccggaaaataccgggtggttaccaagcgaattttaatgaagttggaatctgaataaaaatcattcaaattcaaaaaaaatattgctcggtaaggcgttttctcgtggcgtaccaagattcgcgagtactaggcggtaaccgaacttattgcccggtagcaagacctnnnnnnnnnnnnnnnnnnnnnnnnnnnnnnnnnnnnnnnnnnnnnnnnnnnnnnnnnnnnnnnnnnnnnnnnnnnnnnnnnnnnnnnnnnnnnnnnnnnnnnnnnnnnnnnnnnnnnnnnnnnnnnnnnnnnnnnnnnnnnnnnnnnnnnnnnnnnnnnnnnnnnnnnnnnnnnnnnnnnnnnnnnnnnnnnnnnnnnnnnnnnnnnnnnnnnnnnnnnnnnnnnnnnnnnnnnnnnnnnnnnnnnnnnnnnnnnnnnnnnnnnnnnnnnnnnnnnnnnnnnnnnnnnnnnnnnnnnnnnnnnnnnnnnnnnnnnnnnnnnnnnnnnnnnnnnnnnnnnnnnnnnnnnnnnnnnnnnnnnnnnnnnnnnnnnnnnnnnnnnnnnnnnnnnnnnnnnnnnnnnnnnnnnnnnnnnnnnnnnnnnnnnnnnnnnnnnnnnnnnnnnnnnnnnnnnnnnnnnnnnnnnnnnnnnnnnnnnnnnnnnnnnnnnnnnnnnnnnnnnnnnnnnnnnnnnnnnnnnnnnnnnnnnnnnnnnnnnnnnnnnnnnnnnnnnnnnnnnnnnnnnnnnnnnnnnnnnnnnnnnnnnnnnnnnnnnnnnnnnnnnnnnnnnnnnnnnnnnnnnnnnnnnnnnnnnnnnnnnnnnnnnnnnnnnnnnnnnnnnnnnnnnnnnnnnnnnnnnnnnnnnnnnnnnnnnnnnnnnnnnnnnnnnnnnnnnnnnnnnnnnnnnnnnnnnnnnnnnnnnnnnnnnnnnnnnnnnnnnnnnnnnnnnnnnnnnnnnnnnnnnnnnnnnnnnnnnnnnnnnnnnnnnnnnnnnnnnnnnnnnnnnnnnnnnnnnnnnnnnnnnnnnnnnnnnnnnnnnnnnnnnnnnnnnnnnnnnnnnnnnnnnnnnnnnnnnnnnnnnnnnnnnnnnnnnnnnnnnnnnnnnnnnnnnnnnnnnnnnnnnnnnnnnnnnnnnnnnnnnnnnnnnnnnnnnnnnnnnnnnnnnnnnnnnnnnnnnnnnnnnnnnnnnnnnnnnnnnnnnnnnnnnnnnnnnnnnnnnnnnnnnnnnnnnnnnnnnnnnnnnnnnnnnnnnnnnnnnnnnnnnnnnnnnnnnnnnnnnnnnnnnnnnnnnnnnnnnnnnnnnnnnnnnnnnnnnnnnnnnnnnnnnnnnnnnnnnnnnnnnnnnnnnnnnnnnnnnnnnnnnnnnnnnnnnnnnnnnnnnnnnnnnnnnnnnnnnnnnnnnnnnnnnnnnnnnnnnnnnnnnnnnnnnnnnnnnnnnnnnnnnnnnnnnnnnnnnnnnnnnnnnnnnnnnnnnnnnnnnnnnnnnnnnnnnnnnnnnnnnnnnnnnnnnnnnnnnnnnnnnnnnnnnnnnnnnnnnnnnnnnnnnnnnnnnnnnnnnnnnnnnnnnnnnnnnnnnnnnnnnnnnnnnnnnnnnnnnnnnnnnnnnnnnnnnnnnnnnnnnnnnnnnnnnnnnnnnnnnnnnnnnnnnnnnnnnnnnnnnnnnnnnnnnnnnnnnnnnnnnnnnnnnnnnnnnnnnnnnnnnnnnnnnnnnnnnnnnnnnnnnnnnnnnnnnnnnnnnnnnnnnnnnnnnnnnnnnnnnnnnnnnnnnnnnnnnnnnnnnnnnnnnnnnnnnnnnnnnnnnnnnnnnnnnnnnnnnnnnnnnnnnnnnnnnnnnnnnnnnnnnnnnnnnnnnnnnnnnnnnnnnnnnnnnnnnnnnnnnnnnnnnnnnnnnnnnnnnnnnnnnnnnnnnnnnnnnnnnnnnnnnnnnnnnnnnnnnnnnnnnnnnnnnnnnnnnnnnnnnnnnnnnnnnnnnnnnnnnnnnnnnnnnnnnnnnnnnnnnnnnnnnnnnnnnnnnnnnnnnnnnnnnnnnnnnnnnnnnnnnnnnnnnnnnnnnnnnnnnnnnnnnnnnnnnnnnnnnnnnnnnnnnnnnnnnnnnnnnnnnnnnnnnnnnnnnnnnnnnnnnnnnnnnnnnnnnnnnnnnnnnnnnnnnnnnnnnnnnnnnnnnnnnnnnnnnnnnnnnnnnnnnnnnnnnnnnnnnnnnnnnnnnnnnnnnnnnnnnnnnnnnnnnnnnnnnnnnnnnnnnnnnnnnnnnnnnnnnnnnnnnnnnnnnnnnnnnnnnnnnnnnnnnnnnnnnnnnnnnnnnnnnnnnnnnnnnnnnnnnnnnnnnnnnnnnnnnnnnnnnnnnnnnnnnnnnnnnnnnnnnnnnnnnnnnnnnnnnnnnnnnnnnnnnnnnnnnnnnnnnnnnnnnnnnnnnnnnnnnnnnnnnnnnnnnnnnnnnnnnnnnnnnnnnnnnnnnnnnnnnnnnnnnnnnnnnnnnnnnnnnnnnnnnnnnnnnnnnnnnnnnnnnnnnnnnnnnnnnnnnnnnnnnnnnnnnnnnnnnnnnnnnnnnnnnnnnnnnnnnnnnnnnnnnnnnnnnnnnnnnnnnnnnnnnnnnnnnnnnnnnnnnnnnnnnnnnnnnnnnnnnnnnnnnnnnnnnnnnnnnnnnnnnnnnnnnnnnnnnnnnnnnnnnnnnnnnnnnnnnnnnnnnnnnnnnnnnnnnnnnnnnnnnnnnnnnnnnnnnnnnnnnnnnnnnnnnnnnnnnnnnnnnnnnnnnnnnnnnnnnnnnnnnnnnnnnnnnnnnnnnnnnnnnnnnnnnnnnnnnnnnnnnnnnnnnnnnnnnnnnnnnnnnnnnnnnnnnnnnnnnnnnnnnnnnnnnnnnnnnnnnnnnnnnnnnnnnnnnnnnnnnnnnnnnnnnnnnnnnnnnnnnnnnnnnnnnnnnnnnnnnnnnnnnnnnnnnnnnnnnnnnnnnnnnnnnnnnnnnnnnnnnnnnnnnnnnnnnnnnnnnnnnnnnnnnnnnnnnnnnnnnnnnnnnnnnnnnnnnnnnnnnnnnnnnnnnnnnnnnnnnnnnnnnnnnnnnnnnnnnnnnnnnnnnnnnnnnnnnnnnnnnnnnnnnnnnnnnnnnnnnnnnnnnnnnnnnnnnnnnnnnnnnnnnnnnnnnnnnnnnnnnnnnnnnnnnnnnnnnnnnnnnnnnnnnnnnnnnnnnnnnnnnnnnnnnnnnnnnnnnnnnnnnnnnnnnnnnnnnnnnnnnnnnnnnnnnnnnnnnnnnnnnnnnnnnnnnnnnnnnnnnnnnnnnnnnnnnnnnnnnnnnnnnnnnnnnnnnnnnnnnnnnnnnnnnnnnnnnnnnnnnnnnnnnnnnnnnnnnnnnnnnnnnnnnnnnnnnnnnnnnnnnnnnnnnnnnnnnnnnnnnnnnnnnnnnnnnnnnnnnnnnnnnnnnnnnnnnnnnnnnnnnnnnnnnnnnnnnnnnnnnnnnnnnnnnnnnnnnnnnnnnnnnnnnnnnnnnnnnnnnnnnnnnnnnnnnnnnnnnnnnnnnnnnnnnnnnnnnnnnnnnnnnnnnnnnnnnnnnnnnnnnnnnnnnnnnnnnnnnnnnnnnnnnnnnnnnnnnnnnnnnnnnnnnnnnnnnnnnnnnnnnnnnnnnnnnnnnnnnnnnnnnnnnnnnnnnnnnnnnnnnnnnnnnnnnnnnnnnnnnnnnnnnnnnnnnnnnnnnnnnnnnnnnnnnnnnnnnnnnnnnnnnnnnnnnnnnnnnnnnnnnnnnnnnnnnnnnnnnnnnnnnnnnnnnnnnnnnnnnnnnnnnnnnnnnnnnnnnnnnnnnnnnnnnnnnnnnnnnnnnnnnnnnnnnnnnnnnnnnnnnnnnnnnnnnnnnnnnnnnnnnnnnnnnnnnnnnnnnnnnnnnnnnnnnnnnnnnnnnnnnnnnnnnnnnnnnnnnnnnnnnnnnnnnnnnnnnnnnnnnnnnnnnnnnnnnnnnnnnnnnnnnnnnnnnnnnnnnnnnnnnnnnnnnnnnnnnnnnnnnnnnnnnnnnnnnnnnnnnnnnnnnnnnnnnnnnnnnnnnnnnnnnnnnnnnnnnnnnnnnnnnnnnnnnnnnnnnnnnnnnnnnnnnnnnnnnnnnnnnnnnnnnnnnnnnnnnnnnnnnnnnnnnnnnnnnnnnnnnnnnnnnnnnnnnnnnnnnnnnnnnnnnnnnnnnnnnnnnnnnnnnnnnnnnnnnnnnnnnnnnnnnnnnnnnnnnnnnnnnnnnnnnnnnnnnnnnnnnnnnnnnnnnnnnnnnnnnnnnnnnnnnnnnnnnnnnnnnnnnnnnnnnnnnnnnnnnnnnnnnnnnnnnnnnnnnnnnnnnnnnnnnnnnnnnnnnnnnnnnnnnnnnnnnnnnnnnnnnnnnnnnnnnnnnnnnnnnnnnnnnnnnnnnnnnnnnnnnnnnnnnnnnnnnnnnnnnnnnnnnnnnnnnnnnnnnnnnnnnnnnnnnnnnnnnnnnnnnnnnnnnnnnnnnnnnnnnnnnnnnnnnnnnnnnnnnnnnnnnnnnnnnnnnnnnnnnnnnnnnnnnnnnnnnnnnnnnnnnnnnnnnnnnnnnnnnnnnnnnnnnnnnnnnnnnnnnnnnnnnnnnnnnnnnnnnnnnnnnnnnnnnnnnnnnnnnnnnnnnnnnnnnnnnnnnnnnnnnnnnnnnnnnnnnnnnnnnnnnnnnnnnnnnnnnnnnnnnnnnnnnnnnnnnnnnnnnnnnnnnnnnnnnnnnnnnnnnnnnnnnnnnnnnnnnnnnnnnnnnnnnnnnnnnnnnnnnnnnnnnnnnnnnnnnnnnnnnnnnnnnnnnnnnnnnnnnnnnnnnnnnnnnnnnnnnnnnnnnnnnnnnnnnnnnnnnnnnnnnnnnnnnnnnnnnnnnnnnnnnnnnnnnnnnnnnnnnnnnnnnnnnnnnnnnnnnnnnnnnnnnnnnnnnnnnnnnnnnnnnnnnnnnnnnnnnnnnnnnnnnnnnnnnnnnnnnnnnnnnnnnnnnnnnnnnnnnnnnnnnnnnnnnnnnnnnnnnnnnnnnnnnnnnnnnnnnnnnnnnnnnnnnnnnnnnnnnnnnnnnnnnnnnnnnnnnnnnnnnnnnnnnnnnnnnnnnnnnnnnnnnnnnnnnnnnnnnnnnnnnnnnnnnnnnnnnnnnnnnnnnnnnnnnnnnnnnnnnnnnnnnnnnnnnnnnnnnnnnnnnnnnnnnnnnnnnnnnnnnnnnnnnnnnnnnnnnnnnnnnnnnnnnnnnnnnnnnnnnnnnnnnnnnnnnnnnnnnnnnnnnnnnnnnnnnnnnnnnnnnnnnnnnnnnnnnnnnnnnnnnnnnnnnnnnnnnnnnnnnnnnnnnnnnnnnnnnnnnnnnnnnnnnnnnnnnnnnnnnnnnnnnnnnnnnnnnnnnnnnnnnnnnnnnnnnnnnnnnnnnnnnnnnnnnnnnnnnnnnnnnnnnnnnnnnnnnnnnnnnnnnnnnnnnnnnnnnnnnnnnnnnnnnnnnnnnnnnnnnnnnnnnnnnnnnnnnnnnnnnnnnnnnnnnnnnnnnnnnnnnnnnnnnnnnnnnnnnnnnnnnnnnnnnnnnnnnnnnnnnnnnnnnnnnnnnnnnnnnnnnnnnnnnnnnnnnnnnnnnnnnnnnnnnnnnnnnnnnnnnnnnnnnnnnnnnnnnnnnnnnnnnnnnnnnnnnnnnnnnnnnnnnnnnnnnnnnnnnnnnnnnnnnnnnnnnnnnnnnnnnnnnnnnnnnnnnnnnnnnnnnnnnnnnnnnnnnnnnnnnnnnnnnnnnnnnnnnnnnnnnnnnnnnnnnnnnnnnnnnnnnnnnnnnnnnnnnnnnnnnnnnnnnnnnnnnnnnnnnnnnnnnnnnnnnnnnnnnnnnnnnnnnnnnnnnnnnnnnnnnnnnnnnnnnnnnnnnnnnnnnnnnnnnnnnnnnnnnnnnnnnnnnnnnnnnnnnnnnnnnnnnnnnnnnnnnnnnnnnnnnnnnnnnnnnnnnnnnnnnnnnnnnnnnnnnnnnnnnnnnnnnnnnnnnnnnnnnnnnnnnnnnnnnnnnnnnnnnnnnnnnnnnnnnnnnnnnnnnnnnnnnnnnnnnnnnnnnnnnnnnnnnnnnnnnnnnnnnnnnnnnnnnnnnnnnnnnnnnnnnnnnnnnnnnnnnnnnnnnnnnnnnnnnnnnnnnnnnnnnnnnnnnnnnnnnnnnnnnnnnnnnnnnnnnnnnnnnnnnnnnnnnnnnnnnnnnnnnnnnnnnnnnnnnnnnnnnnnnnnnnnnnnnnnnnnnnnnnnnnnnnnnnnnnnnnnnnnnnnnnnnnnnnnnnnnnnnnnnnnnnnnnnnnnnnnnnnnnnnnnnnnnnnnnnnnnnnnnnnnnnnnnnnnnnnnnnnnnnnnnnnnnnnnnnnnnnnnnnnnnnnnnnnnnnnnnnnnnnnnnnnnnnnnnnnnnnnnnnnnnnnnnnnnnnnnnnnnnnnnnnnnnnnnnnnnnnnnnnnnnnnnnnnnnnnnnnnnnnnnnnnnnnnnnnnnnnnnnnnnnnnnnnnnnnnnnnnnnnnnnnnnnnnnnnnnnnnnnnnnnnnnnnnnnnnnnnnnnnnnnnnnnnnnnnnnnnnnnnnnnnnnnnnnnnnnnnnnnntaccttgcattcgatcacatttgaccaggaagcgacatttttttttattaaaggacgcttattattgacacaaaattcacatgaagagatacaaaaatctcatatccagcttttgcataattaaaatgcacgcaaccaacacataatgagagcgacgagtctgacatgtgtaacgagactgaggagagcgatgagtcgagaggaggttggggtggaggtaagggtttgctcgtgccaccccattgggagcaacactggcatgctttcttttcttcgagcctatattcaannnnnnnnnnnnnnnnnnnnnnnnnnnnnnnnnnnnnnnnnnnnnnnnnnnnnnnnnnnnnnnnnnnnnnnnnnnnnnnnnnnnnnnnnnnnnnnnnnnnnnnnnnnnnnnnnnnnnnnnnnnnnnnnnnnnnnnnnnnnnnnnnnnnnnnnnnnnnnnnnnnnnnnnnnnnnnnnnnnnnnnnnnnnnnnnnnnnnnnnnnnnnnnnnnnnnnnnnnnnnntctccccatctctccgggtacgctccatgcgaaagaattcgccccggttgtggctaaggttggtacgtaatagagtccttccttggcgaggcagatataacaccaatgcaggaaaagttgcgttgattaacgcctgcctatcctccttacccatgtttatcatggctttctacttactttcaggcggtacacatgctgtctttgataaacatagaggggtcttttactggaattctgcagataatcgtcacaaatgtagatttgtcaaatggaagctaatgtgtcgacccaaaaaccttggtgggttgggtattattaacactgctatcatgaatcagtgtctcgtgattaaatggtcgtggaagattttgactgtaggggcccactctctttggttctccatcctcaaagccaaatattttccccattctagcccgatgttttcctcaacacgtggaggatcacaattttggaaggccctggtgaaagtgaaacgcttttttcaggctaatgttaagttcgttgtgggagacggttcctccattaggttttggcttgactggtggtgtggagattcacctctctctgtgactttccccacccttttttcatactgtcctaatccggatatttccattgcggagttggctgcgaacagctgggatttggccttccatcgatctctttcccctgtagagtttgaagaatagcaacgtcttactgtcctcttccctacgctctcggtgaatatggattcggtggtttggcctcattctgcttctggtcgtttctcggttaaatctatctattctaagcttatgttggtggatcccctactagcagattttcccaggtgtggagggtccggatccccccgaaagttcagatttttctctggcaagccataaagggaggtctgccggcggccgatcaaattcgcaaaaggaatggtctggtatcagnnnnnnnnnnnnnnnnnnnnnnnnnnnnnnnnnnnnnnnnnnnnnnnnnnnnnnnnnnnnnnnnnnnnnnnnnnnnnnnnnnnnnnnnnnnnnnnnnnnnnnnnnnnnnnnnnnnnnnnnnnnnnnnnnnnnnnnnnnnnnnnnnnnnnnnnnnnnnnnnnnnnnnnnnnnnnnnnnnnnnnnnnnnnnnnnnnnnnnnnnnnnnnnnnnnnnnnnnnnnnnnnnnnnnnnnnnnnnnnnnnnnnnnnnnnnnnnnnnnnnnnnnnnnnnnnnnnnnnnnnnnnnnnnnnnnnnnnnnnnnnnnnnnnnnnnnnnnnnnnnnnnnnnnnnnnnnnnnnnnnnnnnnnnnnnnnnnnnnnnnnnnnnnctcagcgtcttctctttgcagacaggagcatgatgcttagttggttttttctttttctttggctagtatgtcttggcgcttgaactttatccggattgcgtgtcgtgtgctggccagggtgccatgtatctctcccctttttactttggatgggtccgtgtttgtggctcatcccgtctttggtctagttggttatgtttgttgctactctgccttgtgtctttatctataaattcgggcgcatgccttctctctaaaagaacgagactgacatgtgttcatataaacatatagagcatgttattctacttgaaactccatgtgacaagatgacgaggccacgatggacacaacatgtctgacacaatagttcaaaggtagagaaaagannnnnnnnnnnnnnnnnnnnnnnnnnnnnnnnnnnnnnnnnnnnnnnnnnnnnnnnnnnnnnnnnnnnnnnnnnnnnnnnnnnnnnnnnnnnnnnnnagttgattttnnnnnnnnnnnnnnnnnnnnnnnnnnnnnnnnnnnnnnnnnnnnnnnnnnnnnnnnnnnnnnnnnnnnnnnnnnnnnnnnnnnnnnnnnnnnnnnnnnnnnnnnnnnnnnnnnnnnnnnnnnnnnnnnnnnnnnnnnnnnnnnnnnnnnnnnnnnnnnnnnnnnnnnnnnnnnnnnnnnnnnnnnnnnnnnnnnnnnnnnnnnnnnnnnnnnnnnnnnnnnnnnnnnnnnnnnnnnnnnnnnnnnnnnnnnnnnnnnnnnnnnnnnnnnnnnnnnnnnnnnnnnnnnnnnnnnnnnnnnnnnnnnnnnnnnnnnnnnnnnnnnnnnnnnnnnnnnnnnnnnnnnnnnnnnnnnnnnnnnnnnnnnnnnnnnnnnnnnnnnnnnnnnnnnnnnnnnnnnnnnnnnnnnnnnnnnnnnnnnnnnnnnnnnnnnnnnnnnnnnnnnnnnnnnnnnnnnnnnnnnnnnnnnnnnnnnnnnnnnnnnnnnnnnnnnnnnnnnnnnnnnnnnnnnnnnnnnnnnnnnnnnnnnnnnnnnnnnnnnnnnnnnnnnnnnnnnnnnnnnnnnnnnnnnnnnnnnnnnnnnnnnnnnnnnnnnnnnnnnnnnnnnnnnnnnnnnnnnnnnnnnnnnnnnnnnnnnnnnnnnnnnnnnnnnnnnnnnnnnnnnnnnnnnnnnnnnnnnnnnnnnnnnnnnnnnnnnnnnnnnnnnnnnnnnnnnnnnnnnnnnnnnnnnnnnnnnnnnnnnnnnnnnnnnnnnnnnnnnnnnnnnnnnnnnnnnnnnnnnnnnnnnnnnnnnnnnnnnnnnnnnnnnnnnnnnnnnnnnnnnnnnnnnnnnnnnnnnnnnnnnnnnnnnnnnnnnnnnnnnnnnnnnnnnnnnnnnnnnnnnnnnnnnnnnnnnnnnnnnnnnnnnnnnnnnnnnnnnnnnnnnnnnnnnnnnnnnnnnnnnnnnnnnnnnnnnnnnnnnnnnnnnnnnnnnnnnnnnnnnnnnnnnnnnnnnnnnnnnnnnnnnnnnnnnnnnnnnnnnnnnnnnnnnnnnnnnnnnnnnnnnnnnnnnnnnnnnnnnnnnnnnnnnnnnnnnnnnnnnnnnnnccatgtggttgttgctttttttgcattgagacacaaaaagttctcgataacagcaagttaaacctttgtaatgacacgaattccaagcataacaatcgaatcgatttaataaacccttcaagtgtttccttannnnnnnnnnnnnnnnnnnnnnnnnnnnnnnnnnnnnnnnnnnnnnnnnnnnnnnnnnnnnnnnnnnnnnnnnnnnnnnnnnnnnnnnnnnnnnnnnnnnnnnnnnnnnnnnnnnnnnnnnnnnnnnnnnnnnnnnnnnnnnnnnnnnnnnnnnnnnnnnnnnnnnnnnnnnnnnnnnnnnnnnnnnnnnnnnnnntccttgttgagacaagaggtgtttcgcaaaagttccgtgctcttctaactttttttttctcatactagttgggtgttcggcacaaccacaaacatattcaagtagaaattttcagcaacgagtattgtaggtggtttctcaacctactactagtggttataaattttttttgataatttgtgttttctacccattactaaaagcgtcgcattgcaacgtagcctcaggcggagtcctcgtgggaggtggtgatgaggcaagagcctggtgtgaacccacgccggtaccgcaagctcgcccgtgctaggtaacgaccgttttgtccaagccgtcaccctagcccacatgtgggcccaacctatctgaatggggtttaaattaactaaccggtcatcagaatattttgcgaaacaattagaaaaaaagtagtatgtaccagtgaataaattaaaggttgtggagtagtttcttattaccctaacctgaactatgatagcttttatgctgtttagtccagaaatctggatctggaatagcctaacttccaaagactggactggatttaaaaagaacgaagcctccccgccagctgaaatgagcttgtcctagttaaatttgcttcagcttcgtcgtccagatgtagagatctgtatcagtatgcagtacacaaccgtacgaaccccgcaaattaacctgctgcctcttttttgcttgacagcgaccatttgtggatgatttgactaatcccaaaacaaattgtccagacatcagaccccatcctccacgcacgcagtcaccatcacgacgccttgtcacataccctacgtttcccatctgaactgaacgtctgaactctgaacccctttccaaactcactcactgctctcgtcattttggatcatcttcctctgtctctcacactataaaagcatatggctctctccagcaatcatcacgacaccaccacacaccatcgaccatcaacacccttcagttcccgtgctagctagccacgcaacgcaacgcacataaacagcagcagcaatggccgcctggctgaggaaggagaaggccgaagcatactacctcgcggccgatgcaaggggcgacagaggaaagaagatccccaaggggtacctcccgctggcgctggtgggcgaggatggggacggcgacgagcgtgtggtggtgcggatcggggcgctcaaggagccgtgcatggcggcgctgctggagatggccgcgcagcagttcggctacggccagcccggcgtcctcaggatcccctgcgacgcacagcagttccaccgcatggtcgcggccatgtgcagcaagagcaaagccacataactatgtgatttgtctattctctcggtttatcgataggtgaacagtgtgatatgctttctgggccggtttatttagttagacctagagaaggaacaattcgtagtgcgcgtcgtctaaacatgtgtgctcctatctgaacatgggagcggttgcgcgcgtacgcccgaatttgtcacttcaatttgctacgaactgaatagcgctcctgtcaatttggttgttcagtgacctgttcgtgcagtgcaaatcaacatttgttcacgcagctatttcaatttttctccagtggcgtgttcgtgctccttctcttcgtacagtgcaaatcaacatttgtcacttaacgcccaaannnnnnnnnnnnnnnnnnnnnnnnnnnnnnnnnnnnnnnnnnnnnnnnnnnnnnnnnnnnnnnggcggggctagcgaattgccaatgcctgggcacaccttaagctaaaaattgttttggtctatcacacaatgcaagtatcatatgtttagaataaagtcatgtggaatattcgctctactcctnnnnnnnnnnnnnnnnnnnnnnnnnnnnnnnnnnnnnnnnnnnnnnnnnnnnnnnnnnnnnnnnngatcacagaactaaatagaaacaagaaataaaatttcaaacaaatccctaaacactagccaggcaaccaaacctttcgacatctcaacgtgaaaagtccaagctccaatgtttatgttcatgctcatcacttggttgtgggtcttacggtggctccacttgcaaatttcttcgtgttaaccaaaaaatatgctcagttctgatatttaaactagcataactggaccctgtctcacaagctgtcttcctacatgagtattcgccttctaaatcatttcacaagctgaatgggtcctgcttgcagtgagaaaggcccaaatgataagaaaatgttcgaattggaccagtcagagcacattcgttccagcgtatattccgtgatttgccagcgcatttcaacgtttctaacgattccggcagcttgagcagctcgccatagttcatctaaacagcaagctcgagcctgggcacgtgcccaggccccagggtgtgcccgtatgctaaaactgcccctgagtttgggtcaagtagggagcagtgagatgcctcagtatagggcagctgttgaagatgacacttgctggtgcgaaaaaaaacacagttttgctgcacaattattttaaaacacttatttctcgggccctaaaatagggcagttattggagatgctcttatgagcctcacgtttatggaacagttcgttgtgtcggcactctgggttaccctttttctttttagtttataatcatcacattgccattagttattttgccatatgaaactagtcattagtttggctagcttgtgtcaatggagcttgtcataggccatttttagggaaaataaccattttgaatctgcgttgtttttcaatcgttgtctgtgacataatttgcctgatcaattgtttgttgatggggatgggacaagtgcacgtatctaatattctctttattttggatacactttatttttctttacgaattataagggttgtttttcactacatgctgcatgtcagacgacgacatttccagggtcatccatactaagttgggtgatcatgccattgtgagttatgcttttgatattgtttacatctaggtattttttttgtgctttcactgttatttttcataaactttagtttgtgggcttcatgaaaaaaaactttttctatttatattgaaactagttatgtgcatgtgtgacattcatgaaatatgctagttaggatagggctagaggggcctaccacccaccaccctaagttagagggagaggaccaatgccccccccccccaccccctccataccacattgtataatactccctccgcccgggtttattgggcctgctagtcagagctcgagtaccaaggaaaaatattattggtaagcatccatgatttatgagcataactgcaaccaatcttatatacttaagaagttcacacctactaatctatttgcgtgatcataggagtggtttttcactgtagcctgcatgtcagacaacggcatttcgagggtcatccacactgagttgtgtgatcatgccattgtgctggttaattatgatttcgacgttgtttgcatctaggtattttttgcactttcactgttatttttcataaactttagtttgtgggctccatgaaaaataacctttttctatttatgttgaaactagttatgtgcatgtgtgactttcatgaaatatgctagttaggatagggctagaggggcctaccacccatcaccctaannnnnnnnnnnnnnnnnnnnnnnnnnnnnnnnnnnnnnnnnnnnnnnnnnnnnnnnnnnnnnnnnnnnnnnnnnnnnnnnnnnnnnnnnnnnnnnnnnnnnnnnnnnnnnnnnnnnnnnnnnnnnnnnnnnnnnnnnnnnnnnnnnnnnnnnnnnnnnnnnnnnnnnnnnnnnnnnnnnnnnnnnnnnnnnnnnnnnnnnnnnnnnnnnnnnnnnnnnnnnnnnnnnnnnnnnnnnnnnnnnnnnnnnnnnnnnnnnnnnnnnnnnnctagcctaagttaatagaggaccaatgnnnnnnnnnnnnnnnnnnnnnnnnnnnnnatataccacattgtataatatattgcaagaacactaatggcgcgctttgccatgcccatctattttaccaattaactaataaggatctnnnnnnnnnnnnnnnnnnnnnnnnnnnnnnnnnnnnnnnnnnnnnnnnnnnnnnnnnnnnnnnnnnnnnnnnnnnnnnnnnnnnnnnnnnnnnnnnnnnnnnnnnnnnnnnnnnnnnnnnnnnnnnnnnnnnnnnnnnnnnnnnnnnnnnnnnnnnnnnnnnnnnnnnnnnnnnnnnnnnnnnnnnnnnnnnnnnnnnnnnnnnnnnnnnnnnnnnnnnnnnnnnnnnnnnnnnnnnnnnnnnnnnnnnnnnnnnnnnnnnnnnnnnnnnnnnnnnnnnnnnnnnnnnnnnnnnnnnnnnnnnnnnnnnnnnnnnnnnnnnnnnnnnnnnnnnnnnnnnnnnnnnnnnnnnnnnnnnnnnnnnnnnnnnnnnnnnnnnnnnnnnnnnnnnnnnnnnnnnnnnttgccaagagggcctccgtttaagccaatcactcccaaacgacggtgcaggctgaaatgggtggctgacctccttaactttgatggatcctggaatgtttcggtcctcaggcaacacttctatccggtagacattacagagattctgaaaataaaaacctctcgccgaggggaggnnnnnnnnnnnnnnnnnnnnnnnnnnnnnnnnnnnnnnnnnnnnnnnnnnnnnnnnnnnnnnnnnnnnnnnnnnnngatcatggctcgacaaggtactgtggcgtgtagctctcggcctgatggctcaaggccggcgtggaaaatgctatggaactgtggggcaccacccaaaatctgtgtatttgtttggaaggcatctagggaagctctggccacccagctaaataagaagaggcaccatatggaagttgacggagtgtgcaccatctttggccaggaggatgaatcagtacatcgtgcacttgtacgttgtcctcatgcaaaaaatttgtgggatgctatgcgactagtgtgggactatgcgactagtaaacaaaaatgctacacctacgtaggctcttacttaatgttacgtaatcttcctttttataaactaatcagcccccctgattttcatggggtaggcctgggccgttttgacatccaaccaaatcaggccacataagcttttacgtaagtttcgtaagaccttttacgtagatgtagcaaaactcgactagtaaaagggaaccagattggttgttgttgcttttacaggaactgagtgagacccagcgactgctactgctcatgctactttggcgtgtatggcacattcataacgaaccgactcatcaaaagcctctaatcccagttgaggtgtcgaagcggttcctttgtggttacgctgaatctttgttgacaatcaagtacttcccacatgcagatgcaatcgaaggaaaactgccatgtgtgtcacagaacactttgtcccaccggctgtatgggagcccccgcctgaaggatgtaaaataaactttgatggctcgttcgtcgccaccgacggatctgcgggggcaggcatggtcctgcgcgatcacttgggccaggtgatttttgctgcgtgtaggtggctccacgaatgtcgaggacctttggaagcggagctcgccgcctgtttcgaggggctgaaccttgcactgcaatggtctcagaagcctctcatggtggaagcggactgcgctgaactcactgcattgctcgaggctggccgagcggatcactccagtaacatgtaccttgctgcggacattatagagctactaaaggagcgacaatctcaggtttgaaagatcaaccgcttgcagaacaaggttggtcatactatggcatccattgggcgtgggcaggaaaggactgcttgttggctagcaaattttccttcggagattagcatcctcattatgaatgattgtaagaccttattcaattaagtaatgaaatgctttcctccgcaaaaaaaaaactaataaggatcgctataaatgtatgaagacacgaagcacataagtttaatttgtatatattggtcagcagtcaaatgtagtgttgtaggtctgggagtgctatgtaaattcagtttcttgaacctcaagtaaaatgtatttgtcaacactaatgcaagaagaaagttctcacaatcttattaaattcagatctgctacaaattatccagcttgctacaaaatacccgcgatcaaacatacagtcaagcaggaaggattcaaatagtcctcgcttctttgcacgatctttgcagatagtagatatgccactttgttatgtaaaaaacgagttaagagtgtgcatgagcagttacatcaacattgttgccttgttgtatctgattccacacctgaaggccgttctcagtgcataatccatttcttaagaggcaaacttgattagtaaaactggattgtaagaagaaaaacattagttgtttcaaatgggctaagcaaaatcaatatctatgaggagagtgtttacgggaaggggttatatggtacgaaaataaatgcaatcagaccataaaccaaaagtacaaaactctagaagttatttttttctacaacaagggagttctgaaagtacaaagcttgctattgcagatatatcattgctatatatccaacatggcagtaagtaaatacataaatggttaggattttttgataatccactcgccacgagataaccttagaaaacagaaaatggaacgaataaaaatggcttggaatagctcaaatttcaatgctgcaacattcagatgattgtgtagttctactgtaactaatagcgtcatcttgagatcaaaaaatttctgaccagtaagctgcatatatttgaagaattactatctgcacttcagtcttcaccctttgcgtccctatgaaagcgcggttgaggcctggtggcaaatggcaatacatgggaacatgaaaatggtatatctcgaactgatatgtgacttagtaaataaaatacatcgaccaaatcaaagagaagacgctaatcagcaccatcctcgtggtgtattaattaaccatctaagagaatcacatgtctgattgaagtctagaggaagtagaagggaaagggagttgcagcactcatggtggaagtttgatacatatggggtgacgaccatgacccctattagcaaataacctcacagtgtaaccattagcaccttgagaaattccaagatgttggcattcaagcatagcagttccaatgtaggagaatcagccaacccagtgaaccgaggtctaatcaatgtgttacggaacctgcattcatttgggagtacaaaaaagaacatcaggatgcagaactggaatnnnnnnnnnnnnnnnnnnnnnnnnnnnnnaacactgcggtctgcggggctgacgaaatagcaacctcgctctcgactatgcctgtcggacagtttttgtgggagcaagaagtggaatggggaaggagaagcttgcggatggagatcatatataagttcgtgagtaaaggaggagcatgaatcgacagtataaccgacctgcaattgtcacacattcattaccatcaatgacttgtactaaccaactatgatttacttcccgaattgagtcgacaacgaacaattcactctccatggcaacaccccgtcacgcagtgtctctcggagaggggagatccagaaccatggctcgcccgaacccacgctcggcgccgttggatgtagcagtactctcatgaggatacgagccatgttaggattcaaattttataatttgtgctaatcatgtactactgatcatttggcttgtaggcctgcgcgtgctcatctttctttaacctgcatgtgctggcacatgttcccaagtactgtagcacactagacaaacttgagaataaaaaaatattttcagcactgttggtattcccgattatacatagtagcaaatatattgtttcttgtgcttatcctctgattttgtcaaaacaaaaggctaaattttgtcagaaaaatatgctttcatgttttggcagaacaaaattcatgtgttgtcagaacaaaacactgaattttgttggctaactgacacttattcgtctgaggtgacacaaaaatcagtaataaattatcaagacaccacgaaatgggctggcacgcgtacctatggtatttaaattaaattcatacaaagaataaagaattttgcaagtttaagtaaagttgtaaatctgcactgacacactgcagtagtttttgaaaatgtatgctgcatccacaaatacggttgagttatacaacttataaaaaaagcacgcgccaaaatcagactacaactgggaatacacaacaaaaataaaacaagcaagctccctcatctactgggaataaacaagtatgaataatgctggtgcatgggagacaacattcacatggttcgaagaaatatggtattttatattgcacctatggtgttagcatctactaataagtttacttagcaactgtagcccacctaatctcccttttagtgactctcaccatagtttactttacccgttgtgcacacatcccggtaaattgtatctagagatgagtggccttgagcataggttcgggtagaccatggttctacccaatattttcgaaaggaggagcatgaatcgacagtataaccgacctgcaattgtcacacattgattaccatcaatgacttgtactaaccaactgtgatttacttcctgaattgagtcgacaacgaacaattcactctccatggcaacaccccgtcacgcagtgtctctcggagaggctagccagtcggtcgcgtaggtgtagatcggagccgatctaggatctccatatgcgagccaccctcctccctcaaagtgccctttctttccggccaggcacaggtcgccacgtatttcccgcgtctgcctccatgcaagagttgcgactgcgcgaggactgtccattttcccgcgtcccattnnnnnnnnnnnnnnnnnnnnnnnnnnnnnnnnnnnnnnngtgagacagagggagtatttttttcacgggaagtgatggacccagtttagcacacgaggcccagtttaacaagagatagtgaaaatagttaccggcgcattggctcactccgttgcgctgggggtggtgatcaaacgaagctcacacaggatcgggggcaaatcaaatggccaaaaatgcaaaaaaacgaagatccaacggttcagactgctaatgtcctgagagggctgaattaccgcacagttttaatgtctctaaatatccgagcacatataacacataccgtttagataattgtacgagtacataaatcagaaatatcatcaaatacatgttataccataaaaaaattcaaggttgatccatctatttgttctcgatcatcgacgagcagctgtagatcgtcgccgctaccccgagttgcagtgagatcgtcgacaaggagctgcaaatcgtcattgaggatctggagtgttcgattattcagttaacggacggtcaagatgcgcacgagaagatccaacagctcgcgatgctcgtcgttgaatgaaccgttatgtacttttactgcactgtttcacttgtcgccctgttccttttatcactgtttccggctggccatataaagccttgcttacctgtaatcgggatggaatttctgcgagagctttgcaccaaacacttcaaagttcctcttaaaggaatatgacaatctgcaggcagtgtacatctaggaagaatgaagctgaaagacttgtgtattgatggaataatataatccttaaatggccattcaaaatttctcccaaaataaggtgaaaagaaatgatgtagtgttattcacaaaaaaaaaattcgatgtagtgtacttggaatgttcgggcaagtgtctcagaagatgacagttcactctgaattgtaaatttggtggagctgtcaaatctaggcttcaaattacaagtgcagaattttgtcgagtcctgatggatggccctcaacaaagtgggttttgcctttagggttcgggtcatgtaccctgagccgagaactacactcagcaaacacgttttcgagtgggaattggcttttaccgagttttcttggcactcggaaactcagaaattgcagtagtgacagaacaagaatattagggattcatattttctacagctatgacaccgtacaacaaattttgtacagctatgtcgagttttgtacagctatgtcgaatcctatatgcttaataatactaataataacaagactagttccaccaggcaaggggagttaagacagcacgtagagctcagaaaccggatcgccatcacctccggggttgtgccgcccggcgaggcataggcaacacgttccgttgttgattgttcatgccgtgcagcattcattgctgttgagcactgtgcctctgcactggagtaagtctctctttaaacaaagagattcttgcaacaggccgctcagtttcataacgagaaattccttcgagtcgaaggattagttctagggtttgagacatgagatcgtaggcgaaaatcctgccaaaggatgtggcaaggatcatcttctttccttgtttgccaacaactctgatatactgtggcacagtcagcagatatcctgttttataaccaaggcgtaccaagtcgacgcgatgctccagcgaccagtcaccattatcttccctcaccttccagatctccaggcaactaagaacagaagcgcgagggaggaggtcctcccggaccatgcacagcccgccgtcgagctccgtcaggtgcgctccttcccagtcgaagggtggtgcccggacccagctgaacgtctcgtccgcgacggagaaagacagcaccgcggctgccggccttgtggcgaagtgaaactttgggtggatgagccagtgcagacacccgtcggcgaacaccgccggcagtttgtggcacacacccccgaacagcgcggccccggcgaacttgcatggcacgccttcgacggagatgggcctccagcggtctcccccaagggtgtgcacctcgcacctggccctggtaaatgcttcgatgggcgtcccgctgtcgccggtgaacagccgcacgaccttgcactccttggtcttggcgtcgaacccgaggccggccgttgttgaatgtaggatcttgtctgggcaaggcggcagcatggtgactgctcgcgtggtggcgttcaggacatagaacccgctgtaagggtcgtgcaggagggtgaggccgcggcacggcgtggacgttatgcgcgcgctgttgccgcgcatgccggtgagggtgagcagcggcatgccgccgccgtcgtcgctggagcgcaactcggtggagtcgaatctcgcggtccgtgagaggaacagcagcttagctgcgggctccgtcgccgacccagcgccggcggcctccttggccgcgcagaactcctcggaggataccagcgccgcccagtggcggcagacggcgcgggatctgaggatggctttcacgggcagacgcacgagcacctccgcaatcatctcctccggcagcatcgccatcatcttcgttggtttgagcagcaaacaggccgtctctttgaatacatgcaacgtgggaagatgcttggatggatggagtacaaggcaagtttttgttggtttaaaccaattccatctgtgtctctctttatccctaagattctaatcgaatacgtttatgtttcctcctctgtagtccttcacaacgacacaacctcaaaaactcttgaactccttcaacgcaaaaaataaaaaacctcctttttttagccaaaaataaataaaaacctcctgaactgtgttgggctggaaaaattgactgggctttgagcagcgaacaagcccgttgaagcacacggtggaaccggctggcccgtgttaggatacatgtcattatacataactcaattcaagatcctggtagccacacacacacgacatgcatgcctctctacaagtgacaaaatgaacaatagtttcataaaatttaaaccaagttggcgctatggattcgtgatttttagctacattaccagagataacaatattgaatggttagatgataaaacaattagcagacatacatctcttgaagcttccaaatatacgcattaaggaaataagtcaaatatttgatattttaggtggctcaagctagtttttcatgcatgtcgtcttcaacttccagctatgcatcttaacatggaagaaaatgcgccgaggcagtgcactagcagttcgccaaaagaagtagcaaaagaggtgtcatcgtgttgggtatgttccggtgcatggtgtgtgtgtggtgaggacggcaatgcgcggtgtgggcaacgtgtggcagagcgcaggtgtggttgagcgtgagcacgggcatgcattggctgaaggggggcaggggatcgacgacgcgttggtgtggcagtgcaacggtcccacgaccctagcgaggaggacgcgtgtgaggagtgcggggaagaacgcatgaggcggctcccgcttagcacgggtggccagagtgatccaattctcctccttagttaagccaagaatatatactaagaaaaattaagaaaaattgcataggaacaagcacccgcgcaattatgagccaccccattttaaatttatgtctgattttccaccggtcttcccattaattttattttcggataaagtgatttagtcttgggcagatttacaaatataatattactatggatacttaaaaaaattctaattttttcacaaaaaacatttatttatttagaaaatatttagaattttaaaaatgttcataatgccacttttaagtgttcatgtattttaaaaggagaagtaaaaaagaaaaacagacagaaaaaagaaaatatgacaaaaaactagaacaaacaaaacaaatcaaaagaaacaccaagaaaaagaatcatgaaaaaccaaaagaaaagaacagctacatatgtcagctcatctacttagtgcacggattcaagtgcgccgagttggggttgttccgaaggcacgaacaagtaataaataagattaacaaaaagtaaataagattgactcggctcggcctatgttcttgtttttttaacaacaaaggcgctcgaagcgccaaattcatttcagctcagaaaacagtgtacatcgtgaattacaaactcctgaacctgaaaatttgagagaagagacagcacaggacaggaactatgtctatgagctgaagcgaagcaacaaacttgaggttcaaccctagaatgaagaacctggtgagctacattgtgtgatatgccattaatttccctagaaatgtgaaacactcgaggttgcaagctgttagcatgcttgaagaaatcagccaaaggcttcctgatgctccaaggggtggtagattccaaaatcttgccagtagcagccaccaaagataaagagagacaatccatgagaaaggttggctgcataatattgagcttactagccacttgagctgcaaaagaaagagccagagcttctgcatgtagaggagaagtagtgggaggagctgatgcttgaatttgcacattgatttcaaaacgatcttgaggcaaaacaagatagacccctattccagtagcaactgctccctgtaatagaccaggaacttttgaacttctgaaagcagcgtcagaaaaaaatttggtccccgtaataagaaaatccgacttaagagtttgaccctgcgtaggaagatgatcaggaggagaaagaacttgtggcatcacctgcatcttagagaaatgaggcaagtcattataagaatcagaggacaaggtcatagtagcaatgtgcacatgatgaggaagagccttttccctgtcaaaaaggaaatcatttctagccttccaaagacaccataagaaattaagaatgttagagatagaaccattaggatgtcccatttgaagcaaggcaataaggatagaatgcatggaagtatgaccttggatttaaacatcagacctaataaaccaaggatagtcaaaccaagccgcacgagcaaagggacaaagaaaaaataaatgggattcatcctcctgatggccacacctgcgacagtttttagatatatgtacagagaatcgactagctcgcaaacctgtaggcaaagcccttctaagaagcctccacgcaaaagtttgtaccctaggccaaacatgtttttgtttccaaatcatcttgagaagattcttcaattccaaagaaagaacagaaggagcattcctgggaactgcatgaatgtcctgcaaacaaagcttataagcagatttggaagaacaaataccattcggagtgagatcccaacgaagcaaatctggaccatcatcattgataatatcagtttggagaataattgaggccataggttgctggaaaagtaaatgagcaagctcattattccaaaatttttgtccagggagccaaagatcctttactaaagaaggatatctaaagcccggttcttgaataatgagatgatcatggatggaggcccaaagggtgcaccaaggtgtgctccaaatagagatattaccttgagttaattggtaaaagaatgagctttcaatttaggaatcatttttaataccgaagcccaaaaagcagatttaggagcagaagaatgagcaacccagatggaggagtcatgaaaatatttagccttaagaactaaatacagctgagaaaagggggatttagcaattctccaagcaactgcaagaaaaagactctcattgatagccttcaaatttcttacgcccagtccaccttcttctttagaattgcatatgtctttccatgcacgaagacgaagactcgttgtagaatcattctccctaacacctatccaccaaaaatttctaatgatagcattgagctttgcaataaacttctttgtgaacaagatgttagccatataataaacaggaataacagagaaaatagagtgaatcaattcaagcctcgcaacatgagaaagcatattggctttgtaagcaggcaatttattcataaatttatcaagaacaaagttataggcggcagttctatttttagcaggaagaataaacggatgaccaagatgggtgaaattggtaaccaaggaggaaacaggaaaaacttgcttaatctcctgcattgtaggttggctaactcgagaactaaaaagaatggcagatttggcccagtttggagtttgacctgaaatagaacaaaagtggtgaatgagctgagccatagcattgtcttcctgaatagtggcttgaccacaaaccaacaaatcatctgcaaacaacagagaatgaatagaagggcaatttggtccaagcgaaattacttgaagattttgagcagcaagagcttcattgagagcaatagacaattcattgatagcaataacaaacaaataaggcgacatgggacagccttgacgaataccactgaaacttctaaatttatgtgaaggctgcccattaacaagcatagagaaactaggagaagaaatgcacgcatgaaccaaattaatgaaatgacgatgcaggcctttacgtgcaagcgcagacacaatgaatttccactctatgcgatcaaaagctttagctagatctatttttagcatgaaagcatgatgattccacgaagcaagagagaaagagtgagtaatctcttgagcaataataatgttgtcactaattcttctaccctcaataaaggcttgctgagcaggatcaatatagtccnnnnnnnnnnnnnnnnnnnnnnnnnnnnnnnnnnnnnnnnnnnnnnnnnnnnnnnnnnnnnnnnnnnnnnnnnnnnnnnnnnnnnnnnnnnnnnnnnnnnnnnnnnnnnnnnnnnnnnnnnnnnnnnnnnnnnnnnnnntgtggggaggtaaaataccagtttgataaaagttaatcacaagttgagtgacctcctcccctatccaatcccaagcagccaaataaaattccacattaaaaccatctggacctggagaagcgttcaatttcatctctttaagaatctgcaaaacttcatttttatcaggcagaaaataagtaggatccaaagagttgacaggcaagtgagtattgagaaaaggtcttccaatgtcattcttaggcgaggagaagatgtatctaaaatagttgacaaaagtattagtgatagcagcaggcttaaaatgaatcacatcattctcatccttaacagaacaaacagtattcctttttcttcttttgatcacagcctgatgcaaaattttagtatgcgatcaccagccgtggcccaaccctttttacttctttgtttgtaaaactgattaagtttggaaagagtttgttcatacctaagagtgagagagccttccaaagtatgaatttgttgctacaaaggaagctgttgaatctgattgatacttgattcaagttccaaaagttcttgctgaagaggctttttcttcttgcaccactttttcaaagaacctgccaaagaagaagactttgttgcaaaggagtgagatgtacaattgttccaggcagatttagcgaagttgctaaaatctttctcaagtaacatccagttttcaaatttaaatgtttgcctaggcttaacaaaattaccatcagtggagacaagaatgggagcatggtcactgagaataataggaagattaagcactttagtattaggataatgcatagaccactcagagttaactaggcatcgatctaggcgtctataaataggattagccgtatgttgtttgttacgccaagtgtacgcaggaccactgaaaccaatataaaaaaagccacaacttttaacaagagaacgaaaagcagacaaacgataataattaatactaccattacaaccatttgtatcatacaaattgtcattaagatcacccgtacacatcatgggcttccccaggttatcatacacaaaagcagcaacttgactccagatagtactagtctgcctatgatatgggtcaccatatatacaaatcaagcaaaagtggacacctgaagctagatgaactacattagctagaatatagtgaaaggaggcactatgaacagaaactttgagttcataattccacataagccagagcccaccggaagcacctctagaaggaacaacaaagctattagcaacatcaaacctattaacaagatcaattgatcgaaccttagaagatttgatctcagaaacaaaggttacctgggctctagtagaacggatcaaattagccaggaaaagcatacgatcattgccgagaccccaacccataccccgacaattccaagctatcgctttcatggcgtccgaggctaaaaagaatctgccatattcctgtctgtttcagcatcaaatttcatctcctctcccaactgaccactcctgagatccactctgaaaatccgcgcaattagcttcatggctccaaaatagtcttaatggcaggcacagatgcccgatccaacacgataatcctttctaaacaggcgatttggcagccaacctatttgatgatatgggttgattgatggaggaaactagaaaaatcagccaagcagcagaggttggggagagccagcagcaagcctcgctaggattcaggtggagaggaaaggacggggcacgaggacgaactggaatactgagcactggagaaggatggggaatggatggtgaggggagatcagcgacaaggacaggaaagtagatggcggggatgacgtaccgactttgaacgaagagatgcgaggctgtaagaagcaggggaaacagaagatcaaaggaggaggagcggcaacgttggatccaggagggatgagcgacgccggccaagagtttggttgaagagaggaaaagagaaaaggggatctgggagaggcaacagctatggacaagagaggtggagcagatggagttcaggggaaacaagggatggagaaaggacatcagaggaggaaggggaactgcactggggaggaagaagacggcatcacgccagtcgccggacaatcgccggaagtcgcccacttggaagctcaagcactgcacttgaaggggaaatcacttgttggacggagccgagcctaaacgcccgggctcactcgtctagcctcatctggggggcacgtaaaacaaagccgcactccctacaatccatattaattatagttattttaacttttaatacaattaatgtgagggaatattacattattctttttctatcgacagagaccatttgcagatggtttgactagtaatctctacgcccggaatcagagcccatcgtccacgctcgcagtcaccatcatcacaccttgtcacataccctacgttaactgtctgaactgaacccctttccaaactcgcttactgctcgatcttggcgtcgcgtttccgaaatcagccgcatcctaatcgattaacccgggacgattttcctctctcacactataaaagcatatgccatggctctctcgagnnnnnnnnnnnnnnnnnnnnnnnnnnnnnnnnnnnnnntaaaccattaacaccttcagttcccgtgctagctagccacgcaacacccacgtaacagcagcagctgcaatggccgcctggcgaaggaaggagacggccgaagcatacgtgctcgctgcccccggcgacggagggaaggtccccaaggggtacctcccgctggcgctggtgggcgaggagggagacggcgatgagcgggtggtggtgcgcatcggcgcgctcaaggagccgtgcatggcggcgctgctggagatggccgcgcagcagttcggctacggccagccaggcgttctcaggatcccctgcgacggccggcagttccaccaaatggtcagcgccatgtgcagcaagagcagagccgcgtggagtggctagtgattattaccgctgcacatcgtctcaacaagccacgtacccgggagaagcatagattggaagagggatgctcgtggacaaattacaatcacctcaaatgcgcatgttttctagatttgtttagtcagagaaggaacacttcgtgttggttgtgtatagtccacataacaacacatggacagcggatttggtctgctttcagcgaggagctcctatgtactccctccgtttgtttttataagacttttcagacagcttgatttgtactctctgtcctaaaatataagacttttttaggcttacactatgtctcaaaaacaaacccagttagtactagattgttttgaacagtgtctaaacgtcgaaaacgtcctataaaaataaacagaggtagtaatcaggtaaggcttgccgtcgttggttcttggttcgaaccttggtgattggcagacacggcgtcagagacgaggcattcggttttcaggttcagtcttcgggtattcacaacactgatttcccctcgctcccacgcgacagaaaccctcaatcggcagtggcggcgcggcggctgcctctcccgctcccgccctcccccttcttcggttttcccggcgaccccgattcgccggcctgctccgtgacgccggggaagacggagtgggcgccaccccgctgcgccggcctgcgccgcgacgacggtgagggggaaaccccacactgcgctgcgtcggcctgcaccgtgatgctggtagcaggggaggannnnnnnnnnnnnnnnnnnntgacaacgagcctagattcgtgcacagtaagtcccctgatccctagtttctgtttctgtagcaaactgaaattccaccagattggatggttcagagagagctctcccatcacttaacttcccctgattagatgatctttgctaataaatacaattggaaatcgtcaatttacacatatcatttgactatgctgcgcactaagctcaagttcagataaccatgaagcagcttctagttctaagcattgtcaaatcaagtaggtaggttactggaatttaagttttccatgtctgtccaaaccttggctcgctgtaactcaacacatacatttggtcttccaagtatagtatcatccttgcgaataatttgaccatctgcaggagcaaccccaataagatcaatgacaccaagcagccaactcttcaagctacaacagannnnnnnnnnnnnnnnnnnnnnnnnnnnnnnnnnnnnnnnnnnnnnnnnnnnnnnnnnnnnnnnnnnnnnnnnnnnnnnnnnnnnnnnnnnnnnnnnnnnnnnnnnnnnnnnnnnnnnnnnnnnnnnnnnnnnnnnnnnnnnnnnnnnnnnnnnnnnnnnnnnnnnnnnnnnnnnnnnnnnnnnnnnnnnnnnnnnnnnnnnnnnnnnnnnnnnnnnnnnnnnnnnnnnnnnnnnnnnnnnnnnnnnnnnnnnnnnnnnnnnnnnnnnnnnnnnnnnnnnnnnnnnnnnnnnnnnnnnnnnnnnnnnnnnnnnnnnnnnnnnnnnnnnnnnnnnnnnnnnnnnnnnnnnnnnnnnnnnnnnnnnnnnnnnnnnnnnnnnnnnnnnnnnnnnnnnnnnnnnnnnnnnnnnnnnnnnnnnnnnnnnnnnnnnnnnnnnnnnnnnnnnnnnnnnnnnnnnnnnnnnnnnnnnnnnnnnnnnnnnnnnnnnnnnnnnnnnnnnnnnnnnnnnnnnnnnnnnnnnnnnnnnnnnnnnnnnnnnnnnnnnnnnnnnnnnnnnnnnnnnnnnnnnnnnnnnnnnnnnnnnnnnnnnnnnnnnnnnnnnnnnnnnnnnnnnnnnnnnnnnnnnnnnnnnnnnnnnnnnnnnnnnnnnnnnnnnnnnnnnnnnnnnnnnnnnnnnnnnnnnnnnnnnnnnnnnnnnnnnnnnnnnnnnnnnnnnnnnnnnnnnnnnnnnnnnnnnnnnnnnnnnnnnnnnnnnnnnnnnnnnnnnnnnnnnnnnnnnnnnnnnnnnnnnnnnnnnnnnnnnnnnnnnnnnnnnnnnnnnnnnnnnnnnnnnnnnnnnnnnnnnnnnnnnnnnnnnnnnnnnnnnnnnnnnnnnnnnnnnnnnnnnnnnnnnnnnnnnnnnnnnnnnnnnnnnnnnnnnnnnnnnnnnnnnnnnnnnnnnnnnnnnnnnnnnnnnnnnnnnnnnnnnnnnnnnnnnnnnnnnnnnnnnnnnnnnnnnnnnnnnnnnnnnnnnnnnnnnnnnnnnnnnnnnnnnnnnnnnntgcttgtgatagcttcaacactctgatctttgtgtctgnnnnnnnnnnnnnnnnnnnnnnnnnnnnnnnnnnnnnnnnnnnnnnnnnnnnnnnnnnnnnnnnnnnnnnnnnnnnnnnnnnnnnnnnnnnnnnnnnnnnnnnnnnnnnnnnnnnnnnnnnnnnnnnnnnnnnnnnnnnnnnnnnnnnnnnnnnnnnnnnnnnnnnnnnnnnnnnnnnnnnnnnnnnnnnnnnnnnnnnnnnnnnnnnnnnnnnnnnnnnnnnnnnnnnnnnnnnnnnnnnnnnnnnnnnnnnnnnnnnnnnnnnnnnnnnnnnnnnnnnnnnnnnnnnnnnnnnnnnnnnnnnnnnnnnnnnnnnnnnnnnnnnnnnnnnnnnnnnnnnnnnnnnnnggtgtttctgtaagtatacaccacccaatagtggtgaagaggatactgaggagactgaagctgacaccacccaatttgatattctcgagcttctgtaagtgatgaagaggatacagaacagttgaccaaactagaggaaggtatgaaaataggctcattcggtgcttcctttgtttccctaattccttgctgaatttaactgtttactggttgctttattttaatctcagaactaattcaagaaatgagtggcctcaatgtatccgagactagctctagtaataacaattccatcaccgttgatgattcacatgataaatatgggtgagtactgcttcccctcataagcacaagaatgacgggcaacttggagagtatgatggtaatctcagtgctacattatttgctcacctgcagtttctagagattggagccttgggaatatcttgccgtctctctgatgagttggggtttagtggtgcaaaactgcaaatcttgctggcttgttcgattccagtgaccgtgtcattattttattttggtctgtgcttccataccggaaaatctatcagtcagtcaatgatatgaactcaagttacctgtgtcgtgcagcagctgctgctactaagaactgtaagctactatctattttgcttcaagttatgcaacctcacaactttttatgattcaaacagtaaaaaatagtttcgctattaggaaaatctagcaaaaacgccaaagttgaatcatctaagcattgttgggtgaaaacagtaatggaaacagagattatcagtaggtaatttgtagtgtagtagcacactttcaacttctactgttagcacgttctcaattattttcgccatcttctcatagtagagacaaatggctcaaattcctcccatagagacaaatgctgagccatctacctcaccaaatcatttacgatattctttattatcgtcgacatatgatggactcatgtagtagaaaagcagaaacatctggtttgtagctcataagaacttcttttttttagaaatgcatgatcttattaatcacaaacaaattgaatttaatcaaactcattgtgtagaatcctcaagcaagggatcttattaactaatacctccttcggtacacaatatatggcatcctttttacagtgggtgacataagaaacaacacattgagcactccttcaataataatatgttactaaaaataaaaattctaattcatgatgaaagctgttttaacaatatatctagtcttatagcttcgctaatatattcaatatgaagtctcgtatggccaaattgaagaaactagaccgcgcacaatgcgtagatctgaaatttattgttcaaactccaaatttcaactgttatatatctagtttttgcactgcaactgtgcactggcactataattatacagtctttgcaaatgtcaatagtgaggcagcaatggaatttagttcaattgttgtacaaataatttgccaatcttcgctacagaagcagcgcttgtgacataaactaacctaaaccagacaccgcaaggaatttattttccagatcataataattacatgaacacaaggaaaccttcaagcctcagacactccaggaaatagcaactcaggctacgagcgagggattcagggggcgctgtcacaccacagcataaaacttcagtggttctgctgaaagcggttcactgattgaatctcctcggcaattctagagaacctttggttgtccatcggtaccaaccaagtgatcaatgtcatggatccatgagccgtgcctggcggggacacgatctggggcctccatggtaggtgtgtaggagaagcctcacaggttgctgacgaagggagggctgtggtggtggtgcgcacagaagcggcggaaaaagcggatgtcagatatgatgcaacgccagcgctttcagatgagggagagcnnnnnnnnnnnnnnnnnnnnnnnnnnnnnnnnnnnnnnnnnnnnnnnntaggtttccgacgtccagctgcaccaccacccatgacatcttgccctcctcacagctcgtgtggcagggggaaatgatcaagtgatcagcatcgtggatctgcatttgcacaaacacctagtcagtaatttagtcaggccatatgcctacactagcttctgcatatcattagggaaaacttaaataagagatggagcagtataaaccaagataaactttaataagcatttgattaaccttgaggaagttgactcttgagtgtcccttcaacactgtagcttagtaccatatactaaaaaggatgcttcatgatagaaagtctttcagtagtacaaaccaattcatgtattgggaagcacagatcacataatcaagtaagcattcatcatgaaccaagaagcctcgtgtttccgatcattagaaaatgatgtgaaaggatgggagtgactcaacaaggaaaaggtaggcccatgtaacgcagagtgatcccaaggcatgtgtgatgtcctcggtttcgatgttgcatgggaagtagggatttgccaaggtatgcacaattgatatgaagtgatatgaagtcgtagtaagcatatgcaaataaaccatcccactaagatgaaacagaattagctatgagtgctgaactctacatgatgaataatcgttctaagctctacatgatgaataaatgggtggtaagaaaagtgataaagtataagcctaagaaataaatgaacactaagagcttgatagagagaaaatatggcacctatcttattctacnnnnnnnnnnnnnnnnnnnnnnnnnnnnnnnnnnnnnnnnnnnnnnnnnnnnnnnnnnnnnnnnnnnnnnnnnnnnnnnnnnnnnnntccatttttctttctttttctgccctacaaaagattgataggtgccgacggaagctcttatatatatgaaaataaaagcgaggcataaaatggttggcgaatttcagaaagcgctaaacatgatgactattatgcctcctttaaagatgtacaaagcaaaattcaaatgtgcatggcaaatggatccactacttggaatagcaaatgaggaggtgcaatgataggtagatatggtggactctttggaaaactgaagtggcttaacgggagtttctctctttttttttcctttttttggtcattttaccttttggcttttttttctctcacggttgattcaactgttctatcaaccttggtttcttacctctcacatctcactctttttttagtgagaaactccacaatnnnnnnnnnnnnnnnnnnnnnnnnnnnnnnnnnnnnnnnnnnnnnnnnnnnnnnnnnnnnnnnnnnnnnnnnnnnnnnnnnnnnnnnngatgatcggcttggagggcatcttgtcacgataaaatgcaaacctgaagatgtaaactgtatgaaaaggttgtggaagcgtagcgaactttagaaccatgtcttcatgagttaccacgaagcttttaatgaaagtaatttgaagcatagcagagtgaatataagaacacctgcacacaagatagaattgtgagcacaccacaaatttcttccaggaacagaaaaaatgaagaaacactgattacgcatgaacaatgcataaaactatcatagtacagtatgattacgcatgtactaaccagattatggacaaaatggaagatacagattgagatctccaggatagcatttcttcagctggactgaacttagttatgtcatgacaacttgcttacccgtagaaccaggtctgcctgaaccgacaggagcacaccttttactgagattgatctgaaaagaccagagaaacattgtaacattagcatctgattgtacatttctaattgaaatatggaacagatcagccagagtaaggcacttacaatgcatcacccattatagtaagtgaggatagtttgcacgtaaacagctttgcagcatgtaaatcatctggacaagtgacatcctactttggtgttggctgatcaaaattgcacaagtattacatggacagcaatggacattttttttttttttgcagaagcaggtactttctgctggtggttcccagaacctttcctatactgagaaaacttcagaatttttttctgagattcagcagaacttcaatgtcacatgatgaatttgtgagacttcatgttgctgtagtaattatgatccatttccttgtagtgaaacttgtagagctccaacatctggttcaaaagaaagtcagacattagtatgaagataaataatagagctcgacaaatgtagatcttctaaagtcctagggtacgctgccttggattaagagaattcacaggctttcccctagcttggttaaggaattctttgcttctgacaaatatacaatgttcctattgtttaaagtttcattttacatgtatgcgcttaccagatgataacccttgtaggaatcctacaagtctacaagtgttggactgaatactacaagtgagaagtgtgcatggatggacagagtgattccttgaaggtctcaagattgtgcaactcctagataggaaacgattatttttattttctgaaatcatcaaggtatccatacgatatggtggagcagtcctaaagtttcattttacatgttcatacttaccatatctgtaacacttgtaggaatcctacaagtgttggagtgttggagtgaatactacaaagtgtacagaaatgtataattccaggatatagtcctgcacaataaatggaaacagaacattgttcagtttatgcagtatgtgggaaatcagaccccaaaaaaaagggtctgaagatcaactgtaatactgtatatactgaccagatttatgtacaggcagggcatgccacaagaccctcctggatcgagccagtccttgaagggcacgcaactatgcaactccaaggtagagccctgtatagagtattaaaacaactggtttattcagaaaactcgtcacttagtaatgaggcaaaccagacccacaaaaaatgttatgaagatcaaatgtacacactgaccaaatttatgtacatcagagggtgccacaaggcccttatgtgagaactaggcatgtatggatcgagtgagtccttgaagggctcaaaaccgtgcaactccaagatagagctctgcacagagtattaaaacaagtgggttattcaggaaactcgttacgtagagttcatgtgtaggtactaggaatgagtactagagaaaaaaaataagtttttgtttaccttgaattggtcagatttgactgcagtggcggagctaaacaaggttgattgtgtaggtgggagctgtgtgtgggagagggggg

SEQ ID NO: 21 - DNA, 75783 bp, Artificial Sequence
  Scaffold 1934541
  misc_feature (1866)..(1919): n is a, c, g, or t
  misc_feature (3106)..(3629): n is a, c, g, or t
  misc_feature (3641)..(4644): n is a, c, g, or t
  misc_feature (4689)..(4897): n is a, c, g, or t
  misc_feature (5879)..(6082): n is a, c, g, or t
  misc_feature (8788)..(8830): n is a, c, g, or t
  misc_feature (10937)..(11059): n is a, c, g, or t
  misc_feature (12462)..(12509): n is a, c, g, or t
  misc_feature (12677)..(12783): n is a, c, g, or t
  misc_feature (14883)..(14955): n is a, c, g, or t
  misc_feature (15184)..(17407): n is a, c, g, or t
  misc_feature (17409)..(23634): n is a, c, g, or t
  misc_feature (23734)..(28518): n is a, c, g, or t
  misc_feature (28529)..(29521): n is a, c, g, or t
  misc_feature (29609)..(30123): n is a, c, g, or t
  misc_feature (30166)..(34474): n is a, c, g, or t
  misc_feature (34525)..(34586): n is a, c, g, or t
  misc_feature (34733)..(37614): n is a, c, g, or t
  misc_feature (38234)..(38796): n is a, c, g, or t
  misc_feature (39012)..(41506): n is a, c, g, or t
  misc_feature (41521)..(59518): n is a, c, g, or t
  misc_feature (59542)..(59598): n is a, c, g, or t
  misc_feature (59756)..(59880): n is a, c, g, or t
  misc_feature (62065)..(66992): n is a, c, g, or t
  misc_feature (70275)..(70397): n is a, c, g, or t
  misc_feature (71017)..(71049): n is a, c, g, or t
  misc_feature (73616)..(75783): n is a, c, g, or t
tatgcggcaattctaaatatgaaggcaaccgaatcaaaggagaggcaggagacgagctatatgcggcgattctgaatatgaaggcaaccgaatcaaaggagaggcaggagacgagctatatgcggcgattctgaatatgaaggcaaccgaatcaaaggagaggcaggagacgagctatatgcggcgattctgaatatgaaggcaacggaatcaaaggagaggcaggagacgagctatatgcggcaattctgaatatgaaggcaaccgaatcaaaggagaggcaggagacgagctatatgcggcaattctgaatatgaaggcaaccaaatcaaaggagaggcaggagacgagctatatgcggcaattctgaatatgaaggcaaccgaatcaaaggaggggcaggagacgagctatatgcggcaattctgaatatttaggcaaccgaatcaaaggagcggcaggagacgagctatatgcggcaattctgaatatgatggcaaccgaatcaaaggagcggcaggagacgagctatatgcagcaattctgaatatgaaggcaatcgaatcaaaggagaggccggagacgagctatatgcggcaattctgaatatgaaggcaaccgaatcaaaggagaggcgggagacgagctatatgcagcaattctgaatatgaaggcaaccgaatcaaaggagaggcgggagacgagctatatgcggcaattctgaatatgaaggcaaccaaatcaaaggagaggcgggagacgagctatatgcggcaattctgaatatgaaggcaaccgaatcaaaggagaggcaggagacgagctatatgcggcaattctgaatatgaaggcaaccgaatcaaagaagaggcaggagacgagttatatgcggcaattctgaatatgaaggcaaccgaatcaaaggagtctgaatatgaaggcaaccgaatcaaagaagaggcaggagacgagttatatgcggcaattctgaatatgaaggcaaccgaatcaaaggaggggcaggaggtcgatggggctgcaaggtatcgacaggcgtgtgtgggtggttgagtggagggggcggaggcaacactaacttggaggctggcaagcaggagggatcggcagatgaaaatgaaattttttagagaaaaaaaggaattttttgttgagacttcatttcagctgctcaaatttgataacccacagacacttatcattaaatttctgagttaaaccaaatgagagtcagctagagtgggattttttctagggactagagtgggattaagccctttgtaaagttcggctagagatgccctaacacattgctccactgttcactacatagaaaaagaaaaggaaaaatgactttaaaattcaactgaccaagtaaagacaccacaatcacactatcatgtagatgcaatgagctagatctcctagggcattagtttttggtgacgatgacggatcagtcagtaaccaccactggattggtctgagtaaattagtcaaacaagcatcttctatacttaccaatgtagtataattaactcggaaaattcgaatctgagcccgagctcatttgcacctgcgctcacgaaaaaaattaaaataaatactagaaaaattcaaaaaaatattggatggtggaaaatttgatgcgtgaggtacgctccaattttcaaaacatttgaacttctgtgcagctctcagcaaaaaagacaaatcagaggtatgtaaatgtatactgttcatatactattctagtctgatttgtcttttttgctgagaactgcacagaagtccaaatgttttgaaaattggagcgtacctcacgcatcaaattgtctaccacccaannnnnnnnnnnnnnnnnnnnnnnnnnnnnnnnnnnnnnnnnnnnnnnnnnnnnngacagggtgcagatgcacccgggcaccgaaacgcggttctcaattaactctttatatatatcagtacactaacatctgaaatatgcttcattgctggccgagctatccagtgacaaatagcaccaggacccaaggtgctatatatccaacattcattagccaaaatcagataaggtcaaccaaaaaaacacacacagcaacgggacataagaaattgacatcaaagtctcccaaccttgatacgacatggaacataaccaaacggaaacagtgaaaagatgaacagagacacaagatgtacgcaaagatcaggcaggcaggcaggcaagattgtttcgacccgcttgcttggaaagcataaagcaaatgcaccacaggtactgattattcgatggaagaacccacagcgacgaagccaattcctgcatctcagcaatctaggtacctgtgaacaatcaatatcataagtcaaaccaatctgtaccattcattagtgaaaaaacaatggaagttatataaaatctcatttgttttcaaataaaaatggaaattgtaccaataactccaaggttcgatcatctcagcattatccggaaaagagaaaaaagccatagaaacagagtatcgcaataggtaatttgtagtgtataagtagccacactatcaacttctactgctagcattctcgagataccttccatagaggcaaatcttgagccatctagctaagcaaatcatatgaaatattctttatttaaaaaaaagaccagtagaggaggagccctgcagcttttttaagtaagagagaagatgtgagacccacgttcaaactcacaaaattgaccagtatggccaaataacgcccaagcggttcgaacctgcgccgtcttgaacgcacagcagcactccaaccattaggctaagagcccatccgctaacaaattgaatatgttatcatggacatatgacgggttcatggattagaaaagcagataattctggtttctaactcaaaggcatatgttttagaaatgtatgagctatctggtcactaacaaattgaatacaatcaaattcatgccatacaagcctcgagcaagggatcatacattatcttattaatttatttataactccttcagtagaaaatataagtcattttttacgcagcacaacatcacaaaaannnnnnnnnnnnnnnnnnnnnnnnnnnnnnnnnnnnnnnnnnnnnnnnnnnnnnnnnnnnnnnnnnnnnnnnnnnnnnnnnnnnnnnnnnnnnnnnnnnnnnnnnnnnnnnnnnnnnnnnnnnnnnnnnnnnnnnnnnnnnnnnnnnnnnnnnnnnnnnnnnnnnnnnnnnnnnnnnnnnnnnnnnnnnnnnnnnnnnnnnnnnnnnnnnnnnnnnnnnnnnnnnnnnnnnnnnnnnnnnnnnnnnnnnnnnnnnnnnnnnnnnnnnnnnnnnnnnnnnnnnnnnnnnnnnnnnnnnnnnnnnnnnnnnnnnnnnnnnnnnnnnnnnnnnnnnnnnnnnnnnnnnnnnnnnnnnnnnnnnnnnnnnnnnnnnnnnnnnnnnnnnnnnnnnnnnnnnnnnnnnnnnnnnnnnnnnnnnnnnnnnnnnnnnnnnnnnnnnnnnnnnnnnnnnnnnnnnnnnnnnnnnnnnnnnnnnnnnnnnnnnnnnnnnnnnnnnnnnnnnnnnnnnnnnnnnnnnnnnnnnnncgcataggcagnnnnnnnnnnnnnnnnnnnnnnnnnnnnnnnnnnnnnnnnnnnnnnnnnnnnnnnnnnnnnnnnnnnnnnnnnnnnnnnnnnnnnnnnnnnnnnnnnnnnnnnnnnnnnnnnnnnnnnnnnnnnnnnnnnnnnnnnnnnnnnnnnnnnnnnnnnnnnnnnnnnnnnnnnnnnnnnnnnnnnnnnnnnnnnnnnnnnnnnnnnnnnnnnnnnnnnnnnnnnnnnnnnnnnnnnnnnnnnnnnnnnnnnnnnnnnnnnnnnnnnnnnnnnnnnnnnnnnnnnnnnnnnnnnnnnnnnnnnnnnnnnnnnnnnnnnnnnnnnnnnnnnnnnnnnnnnnnnnnnnnnnnnnnnnnnnnnnnnnnnnnnnnnnnnnnnnnnnnnnnnnnnnnnnnnnnnnnnnnnnnnnnnnnnnnnnnnnnnnnnnnnnnnnnnnnnnnnnnnnnnnnnnnnnnnnnnnnnnnnnnnnnnnnnnnnnnnnnnnnnnnnnnnnnnnnnnnnnnnnnnnnnnnnnnnnnnnnnnnnnnnnnnnnnnnnnnnnnnnnnnnnnnnnnnnnnnnnnnnnnnnnnnnnnnnnnnnnnnnnnnnnnnnnnnnnnnnnnnnnnnnnnnnnnnnnnnnnnnnnnnnnnnnnnnnnnnnnnnnnnnnnnnnnnnnnnnnnnnnnnnnnnnnnnnnnnnnnnnnnnnnnnnnnnnnnnnnnnnnnnnnnnnnnnnnnnnnnnnnnnnnnnnnnnnnnnnnnnnnnnnnnnnnnnnnnnnnnnnnnnnnnnnnnnnnnnnnnnnnnnnnnnnnnnnnnnnnnnnnnnnnnnnnnnnnnnnnnnnnnnnnnnnnnnnnnnnnnnnnnnnnnnnnnnnnnnnnnnnnnnnnnnnnnnnnnnnnnnnnnnnnnnnnnnnnnnnnnnnnnnnnnnnnnnnnnnnnnnnnnnnnnnnnnnnnnnnnnnnnnnnnnnnnnnnnnnnnnnnnnnnnnnnnnnnnnnnnnnnnnnnnnnnnnnnnnnnnnnnnnnnnngtacaacatcacaaaagcaacactctcaccagaccactactaatnnnnnnnnnnnnnnnnnnnnnnnnnnnnnnnnnnnnnnnnnnnnnnnnnnnnnnnnnnnnnnnnnnnnnnnnnnnnnnnnnnnnnnnnnnnnnnnnnnnnnnnnnnnnnnnnnnnnnnnnnnnnnnnnnnnnnnnnnnnnnnnnnnnnnnnnnnnnnnnnnnnnnnnnnnnnnnnnnnnnnnnnnnnnnnnnnnnnnnnnnnnnnnnnnagtgtatttttaaaccgagggtgtatgttagtaaaagtaaaaattgtgattcatgataccgcataaaactaaatggagggtatcaaaattgaaacatagctacatgtagcttaaaccagacaaactatactagtgtccaatagcgaatcacatatgcaagttacattgacaacgaggggtgtgtactacctaccaacagaaaaaacggtacagaaaataataattgcaagcaattggccatctgagaagctagagggagaagaacccgcactaccagaagcacctgggggagagaaactgaacgcaagggaactggatggaaggagggcaagcaaaagggcacatccagcggggagaacatcagtcagccatgcaaagctggtgaagtgaaagcatgatgaagggaatggaaagctggtaaggatagggatgaggaagcacggcatggataaattatccaagacgcagccagccatgaaaacatgatatgaggtagccaggtgggcaacaactgagccaagtgtcatagagagaatcttggagtcctctcttgcaatttggtaattgacaaacggtacttaaaaggaaatcaatttgtttttcgaaagaacatttcaatatacctcaacttacatgcagaaaataagcttacctgctcaaccagcacatcataataaacatatctaacagacaatcacttgtggattgcccacaatttcagccccatcatgttcaccgccaatgcctatccctacaagcataataagtcaaacaatgaaccaaccaatgaaattccaaccgaaggccaaatagacaggagaaaacaccaacaagatatttagttaaaactgacatgtgtaatttgagaaaaaacaactcagctttgatacaacaataggaatatataacaaaaccatagtcattgtaaaattcaaagagcatccccacaaacaatgtatagtgattaatatcgtaaaaatgnnnnnnnnnnnnnnnnnnnnnnnnnnnnnnnnnnnnnnnnnnnnnnnnnnnnnnnnnnnnnnnnnnnnnnnnnnnnnnnnnnnnnnnnnnnnnnnnnnnnnnnnnnnnnnnnnnnnnnnnnnnnnnnnnnnnnnnnnnnnnnnnnnnnnnnnnnnnnnnnnnnnnnnnnnnnnnnnnnnnnnnnnnnnnnnnnnnnnnnnnnnngaagttgtctagaattgtttttaaacttgttccccaacatttgaacaaaacgaagctcatactaataactaatagcaacagaagtgataatgactattcagactttgattatctttaaacaaatttagcgtgaaaaattgccaattttggtgtttcttgtcagttcatatggatattaatatactagattgacttgctagttcataaccattacataaaacggcaccacacaagagtcaggatcaggacagagcactacagcacaacatcactatatattgaagaggtcatcaaacatcaaaacaatcaattaatatgtggcactatttaacattgttaggttggcatgagaggatgtgaatggcattccatcagtgtaaaggcatgctattacctgcagcatacacactttcgaatgcatgatgatgttgatcaaaaatgttgtcaatcctgcaaagttgcttggattgcaatgactcaagctgtaccatgatgacaccatcaccacccgtcaggaacaccacattattttcatctgcaaaccctaatatgaataggggcgcaatctcgtctgaatacggagaaagtagcttgtccagttgaatggtccttcccatcccccatgatgcaacaccatcacagtcggtattcctcttccataattgtgcggtgaggcctgacatggagagtaaacctagcccaccaccctcggctcgcataacagcgaagctattctcctcaccaactggcacttgtatcaccactaagctctgcctctccaaatcaaactcgagaacagcacaaaaacacccagcaagacgccagtaaaaggaattcccaaccaagacgggcgacaagcccgtacagtaaaccggtactggaattggtgttaagataagatcgccccatctgccggtctctgacgaataaacgcaggcgagcacttgcaaatgctgtttgtcccatatggtggcctgtaccaggaccacctggaagtggtccgcctcgccggcagcacgaagcactcccccatgaatctggtttttgatcccgtcgaaccatgggggaaaggcgatgcggtgctggtcgccggtgacggggtcccacaccaggatttgcctcggtaaatcgttggagatgagcacaaggccatgttggcagccgaggagcgagaagccgtagctgtggtcgagccgcaaggagaagcgctcggcggggacgcggtcggggggatccaaggtaggctcgtaggagatgcctcggctgtcgtggatgaagtagccgaggaggggagggctgtggcggtggtgctcgcggaagcggcggatgaagccggggtcggagacgaggaggcgccagcgcttgcagacgagggaggcgcgggggagggtggatggcagcgcggggaggcggaggaggatctcggcgagtaggttttcgtcctccagcggcggcgccgccgccggcgacatctcgcgctgccgtgctttttttagggttacttctatgcggcgaaatgctggggtcgaagcatccgccacagcgtgtgcctgcaagtgagagtgaaagcccactagaagcccacgaccacatcatctctcggtatgtgcggcccggcaggaagtttcagccttgcctaaaaaaaaactaatccttttgccttttgtaataaggctatcctaagccttttgtaatgcagctcaaaaggaattttctttggaaatggatgaaggggccagtcaatgaaatgctaaatcttgtaaacaacttgtgatcatctagttcgtagaaaagatacatttctttggaaatagtagtaagaaacttgtcaaataaaaaatatacgtttggaatttttttgtagaaaagaactagcgatctttttggggttctttatagaggctatcacccttaacttgtcaaaacaattgaaatgtgctacacatttcttactactattaagtgggcaacaatcttattcttatttaatgaaaaaggcaaaggttttgcctcgttttgaagaaatagttcttgagtggtcgatgtatattagtccttgtatataatagcataagcttgccaggcgcatctgagtccaatctcttgcctccgaaatcaggcatttttagatactcacatcactttactgaaagatctttttgcccctaatgacatcgctgcatttttgcatgtgccgcggctaagtcaacacataacacaaggtagctttccaaaggtaacaccctaaacatgaaggcaacttacaaagccgttgctccggtttcactagctactatcgacagaaggccaaacctcaagcgacacctcttgcagcaagcgatgagcacgtcaatgacacccattccaacgaagccgaatttttttgttttcacctggagagcatgactcaaatgacaagccctatcatggctttggtgatgaggggcatgggacaggcaaccagcagcgaggttttgaagaaaagattaatttgcgagggacttctcatcagatggcctcttttttaagaggcttctaatagagaggattctacagagcaagattcactctacttcttttaccaaacaagaagattcatccaattgggtgggagagacagttcttgaattgttactacttatgccagaccaagaattatttgtattgggactccagaacgtacgtgaattgattgctataacaacnnnnnnnnnnnnnnnnnnnnnnnnnnnnnnnnnnnnnnnnnnnaagtctcaagatgcacatcaaacttcgatgggggctcgtgccataacggcgaactacgttaatgcacactcccctaaggcaaccagtaaaataaggggatggagcagaccttctatggtttttgtgaaactaatgttgatgcttcttttgatcacgatctgcttaggagcacagcaggggttgtcctcagagatgacaaagaaaggttcattgttggcggaaattggaggattgattggtgtgttgatgtattaacagcagaagcactagctctaaggtttggcttaatccttgcacataaggctggttgcaatcgccttattgtcaactctgataatatggaagtgattgacacaatgaaaaatgaaggacaatcagcgggtgcggcaaaggcagtgttcgacgattgctattttatggcatgtgatttttctgttactaggtttgaacattgtaatagggaagcaaataaaggttgctcatgaacttgctagactagcgaaattttcagagactagggattagtgtgaggagcctatggaggatattgtatcttttcttattgatgatgtaacacttatttccaattaataaagtgtgatgtttatttaaaaaaaaaagaagattcatccaatttccaggttgaaagtggtaactgaacgtccccagcacactgaagcacatgggtatatatatacatcatctgtactgtacgcttcatttcttaagaagttaactcaaattcagagatgctgttggactagagtacatattcgaacacacaaaaagaattaatcatcatggggataagcagagatatggtggtacatgagccaaccatgctgaaaaacatatgtgcacacacaaaatagtactatggaatgcaagcaaatgaactgcaagattcagcgacaggtcctacgctcaagcaagttcatttctcttcctgccagttcgaatattgcttacggagatcaaacaacgggcggcagttcacagctgagaagattaacccccagttactgttggccaggacaagttaattgctacaagttcacatcacatttaccagggcctgatatatagaaggttaattcctacaggttgacatcaaaggccccatgcgaatggaagaaccggcaacaaatagtctatttctgcatcccagacaacagaaatgtaactcttggtacctgcagagcaaccaatgccatcagccaaactgatttggaatatccattcatgggaaaacgttcaaacttgtctcacaatttttgtttgattcaaactgtaaacattagccaacatttgtggaaaactggaaattacgccaaaaggttaaaattgaatcaacacagaattattggacaaaaccaacattatatagagaaacaacaatagcagatcaactaatttgtaggggcacaccttcggttcctatcgttagcatattctcaagtttttgacaacatctagtcttgtcaattttatcatgcgttcagttaagaaaatgttaaacatcccaatgatcaaaatcgaagaaaatagactgcacagaaaccacaccaacaaccaacgttttttagaagaacatggccctgccccggtaccgttttcatcgaaaacgaaaccaacattcgaacagagtgccagaatgtggggaatggccgaatgccaacccagcaaagcaaacggaaaattatagtttggatcagacaaactatattggatgttatctgagttaaattcacaaatagaggtatgccgaaaaaatatttaaccaaaccgcttaagattagcatagttatacaataacaacgcaagcgatcattgggtatcatagcaatcctgaatgagcaattatgtgaaagaaattgcaaacccatattaatataagaagtttaaagccaaatgctggggcattttagttatcaaatttttgatttgatggaacaaaaaataaatcatcatcaaatttgacactagatacaccaataaacacagaaaaaaaaaacaactcaatgcaatgcagcaagcagcaaaaacaaaaacaaccaccgaaggacaggaaaggaaaatatttcatcctgctgctactaacagatannnnnnnnnnnnnnnnnnnnnnnnnnnnnnnnnnnnnnnnnnnnnnnnnnnnnnnnnnnnnnnnnnnnnnnnnnnnnnnnnnnnnnnnnnnnnnnnnnnnnnnnnnnnnnnnnnnnnnnnnnntagttacctgctgagtcaatacatcaagatagcatgcctatcccaacaaatcacattatgcccgcgtctacaagaataggaagtcaaagaaccaatgagattccaacaaacagttaaacaggtaagaggaggcactaactagatatatacacgcagctaacattcgagtaaaaaatcagttgtatctgatcatgatgaaattcataagtatgtcaataggcctgcaacaaataaaaaaagtctctacttgacatccatagaataaaccacataactcaacaataataatacaagaatatcaaataacttggtttacttttacctgcagtatagacagcttcaaatggataatagtgaaaccagcggtaaaagcggtaggattcgagaagtttcttagactgcaatgattcaaaatggactttgaagacgccgataaatgtccacagtaacaccacattgttgtcctcagcaaacccaagtatccttgggctctgactgccctcctctggattcatggaaagtagcttgtctagggcaacagttcttcccagcacccatgaagccacaccatcacagtccgtcttcctcttccatacttggacgcagtagtctgacaggaagaggaaaccaaggccaccaccctccgcccgcataaccgtgacggagcaggtgttgacattgacatccactggcgcatgtatcacactaaggctctgcgtattcaaattaaattcaagtattccacagaaattccctataaggaaccagtacagggaattcccaaccatcacagagcacatgtcatggtaaaccatggtgagcacatcaggattgtcggccggaagcggcgccgacacgagattgctccatacaccggtctccgacgagtacaccgaggccacagcctgcgtaagttgtatgtcgctgttgcccaccaagacaacctggaagtggtgggcaactccggcagcacgaagcaccgctcctttgatcctggtttcctcattgtcaaaccctggggggacgtctaggtggtgccggtcaccggtgacgggatcccataccaggagctggttccgccgccaaaggaagatgagcatgaggccatggcggcatccgaggatcacataggtgtggacagcgtcgatgggaaatgataggcgggcttgcgggacgcgattggggacctccagcgtaggttcgaaatggacgggggagataccttggacgaagcaaccgaggaggggagggtcgcggcggtggtgctcgcggaagcggcggagaaatcgggcgtcggatacgatgccgcgccagcgctcgcagacgaggaatgcccgggggagggaggacggcagcggggggaggcggaggaggatctcgggcaggaggtcttcgtcctccannnnnnnnnnnnnnnnnnnnnnnnnnnnnnnnnnnnnnnnnnnnnnnntcatctcctcacctgtgcggggctctgctggactggataacgggaagaggggaaatgaaagcccaaaacaaggctggagactgaggcccacgaaggttttaaaatttgtgaactttcaaaggctagaaaaaacagcacagtgtgtgttttctccagaattcggttagnnnnnnnnnnnnnnnnnnnnnnnnnnnnnnnnnnnnnnnnnnnnnnnnnnnnnnnnnnnnnnnnnnnnnnnnnnnnnnnnnnnnnnnnnnnnnnnnnnnnnnnnnnntatgaatgaacatagctgatcatatttttagacttctctttttaggtgacttgtagttcagccaaatatatatcttggtgaacttgctgggatttttctttaaactagcaagttcgaaatcccgtgcgtacaagggtggcctcgtgagcacattaaaccatttcttggacaccccttggcgttccccttacgtcttgcgtacaagtatcatgtggctttactaccgcaaaaactcttgtatcattactttaagaattctaaagaatgttattttttttaaatgaaacagtttctacgtgtacgtatggatgtaaactatgtatggacaaaattccatcggtgcatatttttgtttgtgggctacttaagaggaaagtatgttcatagaaaatggatctactatttgctactattggcctaggaaactatgtaaggagtagcttgcaattagcgtatttccaaatataattttacatactatatggtaacgtgaaagaggggaggcactagtcccttacctccaatttaagacagtgccgtctccaggaatttgaggccttggtgcgaaattcaaaatgtggcaccaaaaaaaatcgtacaactaagcatactctaacataattgtataaattcaaatatgcattattttgtataatgtttcgaaatccattaaatactattgctaaaagagtaaatgtagtactaaagcaataaactgctatcatcttctcacaagaaccatcgtatgcctagtatttcctaaaatggaaatttcacttatgtattcataactaatcttcttgaagacatcattttcaactaatattatcgtcaatgcattgtgtctttcttgaaatgaaatatgccaacatagaaaggtagcacacatgtgtgaataattagctagtactactagaattagaaactgggttacgagtagtgtgtcatattaatcctattaattttcattagaacaaagtacatgcctaagcgagtagtataattgtactcgtatgattgcatttgatttggcagggaatatcgaaataactagagagagaaagcttgtataaaagaataaccctaatctagtgttccccgctcatctatttgaacacgggcttatgactagcgactgacctgggatatatttgtggatgccttgatgagggtgctgtagtaccaaagccgacggcgaaggaagacgcacggcggactcgcggccaaggacccacgcaagagctccgacatggtccaatagcctaactgggccggcccattatagttcaaaaatatgaggaagtcccaaaattgggcgcacaatgtagaagattgaacatgggacctctaggttacgagaccgcgtggatagccactcgaggtgataggttttgtggctactccctccttatcaaaacataagacattttttaagactattttagcctattaaaacatcttatattttggtataaaggaagtaaatagcaacgcgttgctataagaactagctacaaaagtaagaaaattttaaatttcaaacaattttttgaaatttgaacaatttctgaaaaagtaataatttaaaaatatactctgatttttttagtatacgctgagcttttttcaaataaccactgaacatattttaatatacgatgttgttttttttcaaatgcacaatggaattttttcctgtacatggtgaacattttttacatacagtggacaaaaatttgaaaaacatgaacagacttttgagtttccaaacatttattgaaatttatatatacgatgaacaattttccatatatattgaacaattctgtaatatatgctgaataatttttaaaatgcacactgaatttttttgtgatataagttgaacaatatttaaaaacacattgaacattttggtgatatacgctgaataaatatttaaatacactttgatcatttttatcatatgtgctcaactttttagtaatacacaataaacatttagaaataatattttgaacaattccataatatatggtgaacatttccttaaattcacgatgaacatttttgtgacaatgtaatttgtataatgcatgnnnnnnnnnnnnnnnnnnnnnnnnnnnnnnnnnnnnnnnnnnnnnnnnnnnnnnnnnnnnnnnnnnnnnnnnntgaaacagcctcgcgattgtgggccggccaaactgaggcgtcgggagctcaagcttcagtgtagccgcgcccttttgacgcccacgagcgtcaaataggcattgcccactcaggcaacaggacgaaccaggtcagtttttgccaattttctctccggtcggggccccctcgatcttggaggccctgtgcgcagtgcgctcgcacatctcaaccggcataacttaaggtnnnnnnnnnnnnnnnnnnnnnnnnnnnnnnnnnnnnnnnnnnnnnnnnnnnnnnnnnnnnnnnnnnnnnnnnnnnnnnnnnnnnnnnnnnnnnnnnnnnnnnnnnnnnnnnnnnnnnnnnnnnnnnnnnnnnnnnnnnnnnnnnnnnnnnnnnnnnnnnnnnnnnnnnnnnnnnnnnnnnnnnnnnnnnnnnnnnnnnnnnnnnnnnnnnnnnnnnnnnnnnnnnnnnnnnnnnnnnnnnnnnnnnnnnnnnnnnnnnnnnnnnnnnnnnnnnnnnnnnnnnnnnnnnnnnnnnnnnnnnnnnnnnnnnnnnnnnnnnnnnnnnnnnnnnnnnnnnnnnnnnnnnnnnnnnnnnnnnnnnnnnnnnnnnnnnnnnnnnnnnnnnnnnnnnnnnnnnnnnnnnnnnnnnnnnnnnnnnnnnnnnnnnnnnnnnnnnnnnnnnnnnnnnnnnnnnnnnnnnnnnnnnnnnnnnnnnnnnnnnnnnnnnnnnnnnnnnnnnnnnnnnnnnnnnnnnnnnnnnnnnnnnnnnnnnnnnnnnnnnnnnnnnnnnnnnnnnnnnnnnnnnnnnnnnnnnnnnnnnnnnnnnnnnnnnnnnnnnnnnnnnnnnnnnnnnnnnnnnnnnnnnnnnnnnnnnnnnnnnnnnnnnnnnnnnnnnnnnnnnnnnnnnnnnnnnnnnnnnnnnnnnnnnnnnnnnnnnnnnnnnnnnnnnnnnnnnnnnnnnnnnnnnnnnnnnnnnnnnnnnnnnnnnnnnnnnnnnnnnnnnnnnnnnnnnnnnnnnnnnnnnnnnnnnnnnnnnnnnnnnnnnnnnnnnnnnnnnnnnnnnnnnnnnnnnnnnnnnnnnnnnnnnnnnnnnnnnnnnnnnnnnnnnnnnnnnnnnnnnnnnnnnnnnnnnnnnnnnnnnnnnnnnnnnnnnnnnnnnnnnnnnnnnnnnnnnnnnnnnnnnnnnnnnnnnnnnnnnnnnnnnnnnnnnnnnnnnnnnnnnnnnnnnnnnnnnnnnnnnnnnnnnnnnnnnnnnnnnnnnnnnnnnnnnnnnnnnnnnnnnnnnnnnnnnnnnnnnnnnnnnnnnnnnnnnnnnnnnnnnnnnnnnnnnnnnnnnnnnnnnnnnnnnnnnnnnnnnnnnnnnnnnnnnnnnnnnnnnnnnnnnnnnnnnnnnnnnnnnnnnnnnnnnnnnnnnnnnnnnnnnnnnnnnnnnnnnnnnnnnnnnnnnnnnnnnnnnnnnnnnnnnnnnnnnnnnnnnnnnnnnnnnnnnnnnnnnnnnnnnnnnnnnnnnnnnnnnnnnnnnnnnnnnnnnnnnnnnnnnnnnnnnnnnnnnnnnnnnnnnnnnnnnnnnnnnnnnnnnnnnnnnnnnnnnnnnnnnnnnnnnnnnnnnnnnnnnnnnnnnnnnnnnnnnnnnnnnnnnnnnnnnnnnnnnnnnnnnnnnnnnnnnnnnnnnnnnnnnnnnnnnnnnnnnnnnnnnnnnnnnnnnnnnnnnnnnnnnnnnnnnnnnnnnnnnnnnnnnnnnnnnnnnnnnnnnnnnnnnnnnnnnnnnnnnnnnnnnnnnnnnnnnnnnnnnnnnnnnnnnnnnnnnnnnnnnnnnnnnnnnnnnnnnnnnnnnnnnnnnnnnnnnnnnnnnnnnnnnnnnnnnnnnnnnnnnnnnnnnnnnnnnnnnnnnnnnnnnnnnnnnnnnnnnnnnnnnnnnnnnnnnnnnnnnnnnnnnnnnnnnnnnnnnnnnnnnnnnnnnnnnnnnnnnnnnnnnnnnnnnnnnnnnnnnnnnnnnnnnnnnnnnnnnnnnnnnnnnnnnnnnnnnnnnnnnnnnnnnnnnnnnnnnnnnnnnnnnnnnnnnnnnnnnnnnnnnnnnnnnnnnnnnnnnnnnnnnnnnnnnnnnnnnnnnnnnnnnnnnnnnnnnnnnnnnnnnnnnnnnnnnnnnnnnnnnnnnnnnnnnnnnnnnnnnnnnnnnnnnnnnnnnnnnnnnnnnnnnnnnnnnnnnnnnnnnnnnnnnnnnnnnnnnnnnnnnnnnnnnnnnnnnnnnnnnnnnnnnnnnnnnnnnnnnnnnnnnnnnnnnnnnnnnnnnnnnnnnnnnnnnnnnnnnnnnnnnnnnnnnnnnnnnnnnnnnnnnnnnnnnnnnnnnnnnnnnnnnnnnnnnnnnnnnnnnnnnnnnnnnnnnnnnnnnnnnnnnnnnnnnnnnnnnnnnnnnnnnnnnnnnnnnnnnnnnnnnnnnnnnnnnnnnnnnnnnnnnnnnnnnnnnngnnnnnnnnnnnnnnnnnnnnnnnnnnnnnnnnnnnnnnnnnnnnnnnnnnnnnnnnnnnnnnnnnnnnnnnnnnnnnnnnnnnnnnnnnnnnnnnnnnnnnnnnnnnnnnnnnnnnnnnnnnnnnnnnnnnnnnnnnnnnnnnnnnnnnnnnnnnnnnnnnnnnnnnnnnnnnnnnnnnnnnnnnnnnnnnnnnnnnnnnnnnnnnnnnnnnnnnnnnnnnnnnnnnnnnnnnnnnnnnnnnnnnnnnnnnnnnnnnnnnnnnnnnnnnnnnnnnnnnnnnnnnnnnnnnnnnnnnnnnnnnnnnnnnnnnnnnnnnnnnnnnnnnnnnnnnnnnnnnnnnnnnnnnnnnnnnnnnnnnnnnnnnnnnnnnnnnnnnnnnnnnnnnnnnnnnnnnnnnnnnnnnnnnnnnnnnnnnnnnnnnnnnnnnnnnnnnnnnnnnnnnnnnnnnnnnnnnnnnnnnnnnnnnnnnnnnnnnnnnnnnnnnnnnnnnnnnnnnnnnnnnnnnnnnnnnnnnnnnnnnnnnnnnnnnnnnnnnnnnnnnnnnnnnnnnnnnnnnnnnnnnnnnnnnnnnnnnnnnnnnnnnnnnnnnnnnnnnnnnnnnnnnnnnnnnnnnnnnnnnnnnnnnnnnnnnnnnnnnnnnnnnnnnnnnnnnnnnnnnnnnnnnnnnnnnnnnnnnnnnnnnnnnnnnnnnnnnnnnnnnnnnnnnnnnnnnnnnnnnnnnnnnnnnnnnnnnnnnnnnnnnnnnnnnnnnnnnnnnnnnnnnnnnnnnnnnnnnnnnnnnnnnnnnnnnnnnnnnnnnnnnnnnnnnnnnnnnnnnnnnnnnnnnnnnnnnnnnnnnnnnnnnnnnnnnnnnnnnnnnnnnnnnnnnnnnnnnnnnnnnnnnnnnnnnnnnnnnnnnnnnnnnnnnnnnnnnnnnnnnnnnnnnnnnnnnnnnnnnnnnnnnnnnnnnnnnnnnnnnnnnnnnnnnnnnnnnnnnnnnnnnnnnnnnnnnnnnnnnnnnnnnnnnnnnnnnnnnnnnnnnnnnnnnnnnnnnnnnnnnnnnnnnnnnnnnnnnnnnnnnnnnnnnnnnnnnnnnnnnnnnnnnnnnnnnnnnnnnnnnnnnnnnnnnnnnnnnnnnnnnnnnnnnnnnnnnnnnnnnnnnnnnnnnnnnnnnnnnnnnnnnnnnnnnnnnnnnnnnnnnnnnnnnnnnnnnnnnnnnnnnnnnnnnnnnnnnnnnnnnnnnnnnnnnnnnnnnnnnnnnnnnnnnnnnnnnnnnnnnnnnnnnnnnnnnnnnnnnnnnnnnnnnnnnnnnnnnnnnnnnnnnnnnnnnnnnnnnnnnnnnnnnnnnnnnnnnnnnnnnnnnnnnnnnnnnnnnnnnnnnnnnnnnnnnnnnnnnnnnnnnnnnnnnnnnnnnnnnnnnnnnnnnnnnnnnnnnnnnnnnnnnnnnnnnnnnnnnnnnnnnnnnnnnnnnnnnnnnnnnnnnnnnnnnnnnnnnnnnnnnnnnnnnnnnnnnnnnnnnnnnnnnnnnnnnnnnnnnnnnnnnnnnnnnnnnnnnnnnnnnnnnnnnnnnnnnnnnnnnnnnnnnnnnnnnnnnnnnnnnnnnnnnnnnnnnnnnnnnnnnnnnnnnnnnnnnnnnnnnnnnnnnnnnnnnnnnnnnnnnnnnnnnnnnnnnnnnnnnnnnnnnnnnnnnnnnnnnnnnnnnnnnnnnnnnnnnnnnnnnnnnnnnnnnnnnnnnnnnnnnnnnnnnnnnnnnnnnnnnnnnnnnnnnnnnnnnnnnnnnnnnnnnnnnnnnnnnnnnnnnnnnnnnnnnnnnnnnnnnnnnnnnnnnnnnnnnnnnnnnnnnnnnnnnnnnnnnnnnnnnnnnnnnnnnnnnnnnnnnnnnnnnnnnnnnnnnnnnnnnnnnnnnnnnnnnnnnnnnnnnnnnnnnnnnnnnnnnnnnnnnnnnnnnnnnnnnnnnnnnnnnnnnnnnnnnnnnnnnnnnnnnnnnnnnnnnnnnnnnnnnnnnnnnnnnnnnnnnnnnnnnnnnnnnnnnnnnnnnnnnnnnnnnnnnnnnnnnnnnnnnnnnnnnnnnnnnnnnnnnnnnnnnnnnnnnnnnnnnnnnnnnnnnnnnnnnnnnnnnnnnnnnnnnnnnnnnnnnnnnnnnnnnnnnnnnnnnnnnnnnnnnnnnnnnnnnnnnnnnnnnnnnnnnnnnnnnnnnnnnnnnnnnnnnnnnnnnnnnnnnnnnnnnnnnnnnnnnnnnnnnnnnnnnnnnnnnnnnnnnnnnnnnnnnnnnnnnnnnnnnnnnnnnnnnnnnnnnnnnnnnnnnnnnnnnnnnnnnnnnnnnnnnnnnnnnnnnnnnnnnnnnnnnnnnnnnnnnnnnnnnnnnnnnnnnnnnnnnnnnnnnnnnnnnnnnnnnnnnnnnnnnnnnnnnnnnnnnnnnnnnnnnnnnnnnnnnnnnnnnnnnnnnnnnnnnnnnnnnnnnnnnnnnnnnnnnnnnnnnnnnnnnnnnnnnnnnnnnnnnnnnnnnnnnnnnnnnnnnnnnnnnnnnnnnnnnnnnnnnnnnnnnnnnnnnnnnnnnnnnnnnnnnnnnnnnnnnnnnnnnnnnnnnnnnnnnnnnnnnnnnnnnnnnnnnnnnnnnnnnnnnnnnnnnnnnnnnnnnnnnnnnnnnnnnnnnnnnnnnnnnnnnnnnnnnnnnnnnnnnnnnnnnnnnnnnnnnnnnnnnnnnnnnnnnnnnnnnnnnnnnnnnnnnnnnnnnnnnnnnnnnnnnnnnnnnnnnnnnnnnnnnnnnnnnnnnnnnnnnnnnnnnnnnnnnnnnnnnnnnnnnnnnnnnnnnnnnnnnnnnnnnnnnnnnnnnnnnnnnnnnnnnnnnnnnnnnnnnnnnnnnnnnnnnnnnnnnnnnnnnnnnnnnnnnnnnnnnnnnnnnnnnnnnnnnnnnnnnnnnnnnnnnnnnnnnnnnnnnnnnnnnnnnnnnnnnnnnnnnnnnnnnnnnnnnnnnnnnnnnnnnnnnnnnnnnnnnnnnnnnnnnnnnnnnnnnnnnnnnnnnnnnnnnnnnnnnnnnnnnnnnnnnnnnnnnnnnnnnnnnnnnnnnnnnnnnnnnnnnnnnnnnnnnnnnnnnnnnnnnnnnnnnnnnnnnnnnnnnnnnnnnnnnnnnnnnnnnnnnnnnnnnnnnnnnnnnnnnnnnnnnnnnnnnnnnnnnnnnnnnnnnnnnnnnnnnnnnnnnnnnnnnnnnnnnnnnnnnnnnnnnnnnnnnnnnnnnnnnnnnnnnnnnnnnnnnnnnnnnnnnnnnnnnnnnnnnnnnnnnnnnnnnnnnnnnnnnnnnnnnnnnnnnnnnnnnnnnnnnnnnnnnnnnnnnnnnnnnnnnnnnnnnnnnnnnnnnnnnnnnnnnnnnnnnnnnnnnnnnnnnnnnnnnnnnnnnnnnnnnnnnnnnnnnnnnnnnnnnnnnnnnnnnnnnnnnnnnnnnnnnnnnnnnnnnnnnnnnnnnnnnnnnnnnnnnnnnnnnnnnnnnnnnnnnnnnnnnnnnnnnnnnnnnnnnnnnnnnnnnnnnnnnnnnnnnnnnnnnnnnnnnnnnnnnnnnnnnnnnnnnnnnnnnnnnnnnnnnnnnnnnnnnnnnnnnnnnnnnnnnnnnnnnnnnnnnnnnnnnnnnnnnnnnnnnnnnnnnnnnnnnnnnnnnnnnnnnnnnnnnnnnnnnnnnnnnnnnnnnnnnnnnnnnnnnnnnnnnnnnnnnnnnnnnnnnnnnnnnnnnnnnnnnnnnnnnnnnnnnnnnnnnnnnnnnnnnnnnnnnnnnnnnnnnnnnnnnnnnnnnnnnnnnnnnnnnnnnnnnnnnnnnnnnnnnnnnnnnnnnnnnnnnnnnnnnnnnnnnnnnnnnnnnnnnnnnnnnnnnnnnnnnnnnnnnnnnnnnnnnnnnnnnnnnnnnnnnnnnnnnnnnnnnnnnnnnnnnnnnnnnnnnnnnnnnnnnnnnnnnnnnnnnnnnnnnnnnnnnnnnnnnnnnnnnnnnnnnnnnnnnnnnnnnnnnnnnnnnnnnnnnnnnnnnnnnnnnnnnnnnnnnnnnnnnnnnnnnnnnnnnnnnnnnnnnnnnnnnnnnnnnnnnnnnnnnnnnnnnnnnnnnnnnnnnnnnnnnnnnnnnnnnnnnnnnnnnnnnnnnnnnnnnnnnnnnnnnnnnnnnnnnnnnnnnnnnnnnnnnnnnnnnnnnnnnnnnnnnnnnnnnnnnnnnnnnnnnnnnnnnnnnnnnnnnnnnnnnnnnnnnnnnnnnnnnnnnnnnnnnnnnnnnnnnnnnnnnnnnnnnnnnnnnnnnnnnnnnnnnnnnnnnnnnnnnnnnnnnnnnnnnnnnnnnnnnnnnnnnnnnnnnnnnnnnnnnnnnnnnnnnnnnnnnnnnnnnnnnnnnnnnnnnnnnnnnnnnnnnnnnnnnnnnnnnnnnnnnnnnnnnnnnnnnnnnnnnnnnnnnnnnnnnnnnnnnnnnnnnnnnnnnnnnnnnnnnnnnnnnnnnnnnnnnnnnnnnnnnnnnnnnnnnnnnnnnnnnnnnnnnnnnnnnnnnnnnnnnnnnnnnnnnnnnnnnnnnnnnnnnnnnnnnnnnnnnnnnnnnnnnnnnnnnnnnnnnnnnnnnnnnnnnnnnnnnnnnnnnnnnnnnnnnnnnnnnnnnnnnnnnnnnnnnnnnnnnnnnnnnnnnnnnnnnnnnnnnnnnnnnnnnnnnnnnnnnnnnnnnnnnnnnnnnnnnnnnnnnnnnnnnnnnnnnnnnnnnnnnnnnnnnnnnnnnnnnnnnnnnnnnnnnnnnnnnnnnnnnnnnnnnnnnnnnnnnnnnnnnnnnnnnnnnnnnnnnnnnnnnnnnnnnnnnnnnnnnnnnnnnnnnnnnnnnnnnnnnnnnnnnnnnnnnnnnnnnnnnnnnnnnnnnnnnnnnnnnnnnnnnnnnnnnnnnnnnnnnnnnnnnnnnnnnnnnnnnnnnnnnnnnnnnnnnnnnnnnnnnnnnnnnnnnnnnnnnnnnnnnnnnnnnnnnnnnnnnnnnnnnnnnnnnnnnnnnnnnnnnnnnnnnnnnnnnnnnnnnnnnnnnnnnnnnnnnnnnnnnnnnnnnnnnnnnnnnnnnnnnnnnnnnnnnnnnnnnnnnnnnnnnnnnnnnnnnnnnnnnnnnnnnnnnnnnnnnnnnnnnnnnnnnnnnnnnnnnnnnnnnnnnnnnnnnnnnnnnnnnnnnnnnnnnnnnnnnnnnnnnnnnnnnnnnnnnnnnnnnnnnnnnnnnnnnnnnnnnnnnnnnnnnnnnnnnnnnnnnnnnnnnnnnnnnnnnnnnnnnnnnnnnnnnnnnnnnnnnnnnnnnnnnnnnnnnnnnnnnnnnnnnnnnnnnnnnnnnnnnnnnnnnnnnnnnnnnnnnnnnnnnnnnnnnnnnnnnnnnnnnnnnnnnnnnnnnnnnnnnnnnnnnnnnnnnnnnnnnnnnnnnnnnnnnnnnnnnnnnnnnnnnnnnnnnnnnnnnnnnnnnnnnnnnnnnnnnnnnnnnnnnnnnnnnnnnnnnnnnnnnnnnnnnnnnnnnnnnnnnnnnnnnnnnnnnnnnnnnnnnnnnnnnnnnnnnnnnnnnnnnnnnnnnnnnnnnnnnnnnnnnnnnnnnnnnnnnnnnnnnnnnnnnnnnnnnnnnnnnnnnnnnnnnnnnnnnnnnnnnnnnnnnnnnnnnnnnnnnnnnnnnnnnnnnnnnnnnnnnnnnnnnnnnnnnnnnnnnnnnnnnnnnnnnnnnnnnnnnnnnnnnnnnnnnnnnnnnnnnnnnnnnnnnnnnnnnnnnnnnnnnnnnnnnnnnnnnnnnnnnnnnnnnnnnnnnnnnnnnnnnnnnnnnnnnnnnnnnnnnnnnnnnnnnnnnnnnnnnnnnnnnnnnnnnnnnnnnnnnnnnnnnnnnnnnnnnnnnnnnnnnnnnnnnnnnnnnnnnnnnnnnnnnnnnnnnnnnnnnnnnnnnnnnnnnnnnnnnnnnnnnnnnnnnnnnnnnnnnnnnnnnnnnnnnnnnnnnnnnnnnnnnnnnnnnnnnnnnnnnnnnnnnnnnnnnnnnnnnnnnnnnnnnnnnnnnnnnnnnnnnnnnnnnnnnnnnnnnnnnnnnnnnnnnnnnnnnnnnnnnnnnnnnnnnnnnnnnnnnnnnnnnnnnnnnnnnnnnnnnnnnnnnnnnnnnnnnnnnnnnnnnnnnnnnnnnnnnnnnnnnnnnnnnnnnnnnnnnnnnnnnnnnnnnnnnnnnnnnnnnnnnnnnnnnnnnnnnnnnnnnnnnnnnnnnnnnnnnnnnnnnnnnnnnnnnnnnnnnnnnnnnnnnnnnnntgttttctctttcttttcctttttgtttgtttcgagaaagatatcgtccgattctacttctattgattcttttccgatcgagatgtacggatccatgtgnnnnnnnnnnnnnnnnnnnnnnnnnnnnnnnnnnnnnnnnnnnnnnnnnnnnnnnnnnnnnnnnnnnnnnnnnnnnnnnnnnnnnnnnnnnnnnnnnnnnnnnnnnnnnnnnnnnnnnnnnnnnnnnnnnnnnnnnnnnnnnnnnnnnnnnnnnnnnnnnnnnnnnnnnnnnnnnnnnnnnnnnnnnnnnnnnnnnnnnnnnnnnnnnnnnnnnnnnnnnnnnnnnnnnnnnnnnnnnnnnnnnnnnnnnnnnnnnnnnnnnnnnnnnnnnnnnnnnnnnnnnnnnnnnnnnnnnnnnnnnnnnnnnnnnnnnnnnnnnnnnnnnnnnnnnnnnnnnnnnnnnnnnnnnnnnnnnnnnnnnnnnnnnnnnnnnnnnnnnnnnnnnnnnnnnnnnnnnnnnnnnnnnnnnnnnnnnnnnnnnnnnnnnnnnnnnnnnnnnnnnnnnnnnnnnnnnnnnnnnnnnnnnnnnnnnnnnnnnnnnnnnnnnnnnnnnnnnnnnnnnnnnnnnnnnnnnnnnnnnnnnnnnnnnnnnnnnnnnnnnnnnnnnnnnnnnnnnnnnnnnnnnnnnnnnnnnnnnnnnnnnnnnnnnnnnnnnnnnnnnnnnnnnnnnnnnnnnnnnnnnnnnnnnnnnnnnnnnnnnnnnnnnnnnnnnnnnnnnnnnnnnnnnnnnnnnnnnnnnnnnnnnnnnnnnnnnnnnnnnnnnnnnnnnnnnnnnnnnnnnnnnnnnnnnnnnnnnnnnnnnnnnnnnnnnnnnnnnnnnnnnnnnnnnnnnnnnnnnnnnnnnnnnnnnnnnnnnnnnnnnnnnnnnnnnnnnnnnnnnnnnnnnnnnnnnnnnnnnnnnnnnnnnnnnnnnnnnnnnnnnnnnnnnnnnnnnnnnnnnnnnnnnnnnnnnnnnnnnnnnnnnnnnnnnnnnnnnnnnnnnnnnnnnnnnnnnnnnnnnnnnnnnnnnnnnnnnnnnnnnnnnnnnnnnnnnnnnnnnnnnnnnnnnnnnnnnnnnnnnnnnnnnnnnnnnnnnnnnnnnnnnnnnnnnnnnnnnnnnnnnnnnnnnnnnnnnnnnnnnnnnnnnnnnnnnnnnnnnnnnnnnnnnnnnnnnnnnnnnnnnnnnnnnnnnnnnnnnnnnnnnnnnnnnnnnnnnnnnnnnnnnnnnnnnnnnnnnnnnnnnnnnnnnnnnnnnnnnnnnnnnnnnnnnnnnnnnnnnnnnnnnnnnnnnnnnnnnnnnnnnnnnnnnnnnnnnnnnnnnnnnnnnnnnnnnnnnnnnnnnnnnnnnnnnnnnnnnnnnnnnnnnnnnnnnnnnnnnnnnnnnnnnnnnnnnnnnnnnnnnnnnnnnnnnnnnnnnnnnnnnnnnnnnnnnnnnnnnnnnnnnnnnnnnnnnnnnnnnnnnnnnnnnnnnnnnnnnnnnnnnnnnnnnnnnnnnnnnnnnnnnnnnnnnnnnnnnnnnnnnnnnnnnnnnnnnnnnnnnnnnnnnnnnnnnnnnnnnnnnnnnnnnnnnnnnnnnnnnnnnnnnnnnnnnnnnnnnnnnnnnnnnnnnnnnnnnnnnnnnnnnnnnnnnnnnnnnnnnnnnnnnnnnnnnnnnnnnnnnnnnnnnnnnnnnnnnnnnnnnnnnnnnnnnnnnnnnnnnnnnnnnnnnnnnnnnnnnnnnnnnnnnnnnnnnnnnnnnnnnnnnnnnnnnnnnnnnnnnnnnnnnnnnnnnnnnnnnnnnnnnnnnnnnnnnnnnnnnnnnnnnnnnnnnnnnnnnnnnnnnnnnnnnnnnnnnnnnnnnnnnnnnnnnnnnnnnnnnnnnnnnnnnnnnnnnnnnnnnnnnnnnnnnnnnnnnnnnnnnnnnnnnnnnnnnnnnnnnnnnnnnnnnnnnnnnnnnnnnnnnnnnnnnnnnnnnnnnnnnnnnnnnnnnnnnnnnnnnnnnnnnnnnnnnnnnnnnnnnnnnnnnnnnnnnnnnnnnnnnnnnnnnnnnnnnnnnnnnnnnnnnnnnnnnnnnnnnnnnnnnnnnnnnnnnnnnnnnnnnnnnnnnnnnnnnnnnnnnnnnnnnnnnnnnnnnnnnnnnnnnnnnnnnnnnnnnnnnnnnnnnnnnnnnnnnnnnnnnnnnnnnnnnnnnnnnnnnnnnnnnnnnnnnnnnnnnnnnnnnnnnnnnnnnnnnnnnnnnnnnnnnnnnnnnnnnnnnnnnnnnnnnnnnnnnnnnnnnnnnnnnnnnnnnnnnnnnnnnnnnnnnnnnnnnnnnnnnnnnnnnnnnnnnnnnnnnnnnnnnnnnnnnnnnnnnnnnnnnnnnnnnnnnnnnnnnnnnnnnnnnnnnnnnnnnnnnnnnnnnnnnnnnnnnnnnnnnnnnnnnnnnnnnnnnnnnnnnnnnnnnnnnnnnnnnnnnnnnnnnnnnnnnnnnnnnnnnnnnnnnnnnnnnnnnnnnnnnnnnnnnnnnnnnnnnnnnnnnnnnnnnnnnnnnnnnnnnnnnnnnnnnnnnnnnnnnnnnnnnnnnnnnnnnnnnnnnnnnnnnnnnnnnnnnnnnnnnnnnnnnnnnnnnnnnnnnnnnnnnnnnnnnnnnnnnnnnnnnnnnnnnnnnnnnnnnnnnnnnnnnnnnnnnnnnnnnnnnnnnnnnnnnnnnnnnnnnnnnnnnnnnnnnnnnnnnnnnnnnnnnnnnnnnnnnnnnnnnnnnnnnnnnnnnnnnnnnnnnnnnnnnnnnnnnnnnnnnnnnnnnnnnnnnnnnnnnnnnnnnnnnnnnnnnnnnnnnnnnnnnnnnnnnnnnnnnnnnnnnnnnnnnnnnnnnnnnnnnnnnnnnnnnnnnnnnnnnnnnnnnnnnnnnnnnnnnnnnnnnnnnnnnnnnnnnnnnnnnnnnnnnnnnnnnnnnnnnnnnnnnnnnnnnnnnnnnnnnnnnnnnnnnnnnnnnnnnnnnnnnnnnnnnnnnnnnnnnnnnnnnnnnnnnnnnnnnnnnnnnnnnnnnnnnnnnnnnnnnnnnnnnnnnnnnnnnnnnnnnnnnnnnnnnnnnnnnnnnnnnnnnnnnnnnnnnnnnnnnnnnnnnnnnnnnnnnnnnnnnnnnnnnnnnnnnnnnnnnnnnnnnnnnnnnnnnnnnnnnnnnnnnnnnnnnnnnnnnnnnnnnnnnnnnnnnnnnnnnnnnnnnnnnnnnnnnnnnnnnnnnnnnnnnnnnnnnnnnnnnnnnnnnnnnnnnnnnnnnnnnnnnnnnnnnnnnnnnnnnnnnnnnnnnnnnnnnnnnnnnnnnnnnnnnnnnnnnnnnnnnnnnnnnnnnnnnnnnnnnnnnnnnnnnnnnnnnnnnnnnnnnnnnnnnnnnnnnnnnnnnnnnnnnnnnnnnnnnnnnnnnnnnnnnnnnnnnnnnnnnnnnnnnnnnnnnnnnnnnnnnnnnnnnnnnnnnnnnnnnnnnnnnnnnnnnnnnnnnnnnnnnnnnnnnnnnnnnnnnnnnnnnnnnnnnnnnnnnnnnnnnnnnnnnnnnnnnnnnnnnnnnnnnnnnnnnnnnnnnnnnnnnnnnnnnnnnnnnnnnnnnnnnnnnnnnnnnnnnnnnnnnnnnnnnnnnnnnnnnnnnnnnnnnnnnnnnnnnnnnnnnnnnnnnnnnnnnnnnnnnnnnnnnnnnnnnnnnnnnnnnnnnnnnnnnnnnnnnnnnnnnnnnnnnnnnnnnnnnnnnnnnnnnnnnnnnnnnnnnnnnnnnnnnnnnnnnnnnnnnnnnnnnnnnnnnnnnnnnnnnnnnnnnnnnnnnnnnnnnnnnnnnnnnnnnnnnnnnnnnnnnnnnnnnnnnnnnnnnnnnnnnnnnnnnnnnnnnnnnnnnnnnnnnnnnnnnnnnnnnnnnnnnnnnnnnnnnnnnnnnnnnnnnnnnnnnnnnnnnnnnnnnnnnnnnnnnnnnnnnnnnnnnnnnnnnnnnnnnnnnnnnnnnnnnnnnnnnnnnnnnnnnnnnnnnnnnnnnnnnnnnnnnnnnnnnnnnnnnnnnnnnnnnnnnnnnnnnnnnnnnnnnnnnnnnnnnnnnnnnnnnnnnnnnnnnnnnnnnnnnnnnnnnnnnnnnnnnnnnnnnnnnnnnnnnnnnnnnnnnnnnnnnnnnnnnnnnnnnnnnnnnnnnnnnnnnnnnnnnnnnnnnnnnnnnnnnnnnnnnnnnnnnnnnnnnnnnnnnnnnnnnnnnnnnnnnnnnnnnnnnnnnnnnnnnnnnnnnnnnnnnnnnnnnnnnnnnnnnnnnnnnnnnnnnnnnnnnnnnnnnnnnnnnnnnnnnnnnnnnnnnnnnnnnnnnnnnnnnnnnnnnnnnnnnnnnnnnnnnnnnnnnnnnnnnnnnnnnnnnnnnnnnnnnnnnnnnnnnnnnnnnnnnnnnnnnnnnnnnnnnnnnnnnnnnnnnnnnnnnnnnnnnnnnnnnnnnnnnnnnnnnnnnnnnnnnnnnnnnnnnnnnnnnnnnnnnnnnnnnnnnnnnnnnnnnnnnnnnnnnnnnnnnnnnnnnnnnnnnnnnnnnnnnnnnnnnnnnnnnnnnnnnnnnnnnnnnnnnnnnnnnnnnnnnnnnnnnnnnnnnnnnnnnnnnnnnnnnnnnnnnnnnnnnnnnnnnnnnnnnnnnnnnnnnnnnnnnnnnnnnnnnnnnnnnnnnnnnnnnnnnnnnnnnnnnnnnnnnnnnnnnnnnnnnnnnnnnnnnnnnnnnnnnnnnnnnnnnnnnnnnnnnnnnnnnnnnnnnnnnnnnnnnnnnnnnnnnnnnnnnnnnnnnnnnnnnnnnnnnnnnnnnnnnnnnnnnnnnnnnnnnnnnnnnnnnnnnnnnnnnnnnnnnnnnnnnnnnnnnnnnnnnnnnnnnnnnnnnnnnnnnnnnnnnnnnnnnnnnnnnnnnnnnnnatggtttatannnnnnnnnnnnnnnnnnnnnnnnnnnnnnnnnnnnnnnnnnnnnnnnnnnnnnnnnnnnnnnnnnnnnnnnnnnnnnnnnnnnnnnnnnnnnnnnnnnnnnnnnnnnnnnnnnnnnnnnnnnnnnnnnnnnnnnnnnnnnnnnnnnnnnnnnnnnnnnnnnnnnnnnnnnnnnnnnnnnnnnnnnnnnnnnnnnnnnnnnnnnnnnnnnnnnnnnnnnnnnnnnnnnnnnnnnnnnnnnnnnnnnnnnnnnnnnnnnnnnnnnnnnnnnnnnnnnnnnnnnnnnnnnnnnnnnnnnnnnnnnnnnnnnnnnnnnnnnnnnnnnnnnnnnnnnnnnnnnnnnnnnnnnnnnnnnnnnnnnnnnnnnnnnnnnnnnnnnnnnnnnnnnnnnnnnnnnnnnnnnnnnnnnnnnnnnnnnnnnnnnnnnnnnnnnnnnnnnnnnnnnnnnnnnnnnnnnnnnnnnnnnnnnnnnnnnnnnnnnnnnnnnnnnnnnnnnnnnnnnnnnnnnnnnnnnnnnnnnnnnnnnnnnnnnnnnnnnnnnnnnnnnnnnnnnnnnnnnnnnnnnnnnnnnnnnnnnnnnnnnnnnnnnnnnnnnnnnnnnnnnnnnnnnnnnnnnnnnnnnnnnnnnnnnnnnnnnnnnnnnnnnnnnnnnnnnnnnnnnnnnnnnnnnnnnnnnnnnnnnnnnnnnnnnnnnnnnnnnnnnnnnnnnnnnnnnnnnnnnnnnnnnnnnnnnnnnnnnnnnnnnnnnnnnnnnnnnnnnnnnnnnnnnnnnnnnnnnnnnnnnnnnnnnnnnnnnnnnnnnnnnnnnnnnnnnnnnnnnnnnnnnnnnnnnnnnnnnnnnnnnnnnnnnnnnnnnnnnnnnnnnnnnnnnnnnnnnnnnnnnnnnnnnnnnnnnnnnnnnnnnnnnnnnnnnnnnnnnnnnnnnnnnnnnnnnnnnnnnnnnnnnnnnnnnnnnnnnnnnnnnnnnnnnnnnnnnnnnnnnnnnnnnnnnnnnatcaacatatcttggttcagatttgaactcctggggcctgcataaacattgtcaggtgagtcaattccaattcatatgatcaattgannnnnnnnnnnnnnnnnnnnnnnnnnnnnnnnnnnnnnnnnnnnnnnnnnnnnnnnnnnnnnnnnnnnnnnnnnnnnnnnnnnnnnnnnnnnnnnnnnnnnnnnnnnnnnnnnnnnnnnnnnnnnnnnnnnnnnnnnnnnnnnnnnnnnnnnnnnnnnnnnnnnnnnnnnnnnnnnnnnnnnnnnnnnnnnnnnnnnnnnnnnnnnnnnnnnnnnnnnnnnnnnnnnnnnnnnnnnnnnnnnnnnnnnnnnnnnnnnnnnnnnnnnnnnnnnnnnnnnnnnnnnnnnnnnnnnnnnnnnnnnnnnnnnnnnnnnnnnnnnnnnnnnnnnnnnnnnnnnnnnnnnnnnnnnnnnnnnnnnnnnnnnnnnnnnnnnnnnnnnnnnnnnnnnnnnnnnnnnnnnnnnnnnnnnnnnnnnnnnnnnnnnnnnnnnnnnnnnnnnnnnnnnnnnnnnnnnnnnnnnnnnnnnnnnnnnnnnnnnnnnnnnnnnnnnnnnnnnnnnnnnnnnnnnnnnnnncggttttcaagcactttattcaatacaaccatatgaacaaccnnnnnnnnnnnnnnnnnnnnnnnnnnnnnnnnnnnnnnnnnnnnnnnnnnnnnnnnnnnnnnnnnnnnnnnnnnnnnnnnnnnnnnnnnnnnnnnnnnnnnnnnnnnnnnnnnnnnnnnnnnnnnnnnnnnnnnnnnnnnnnnnnnnnnnnnnnnnnnnnnnnnnnnnnnnnnnnnnnnnnnnnnnnnnnnnnnnnnnnnnnnnnnnnnnnnnnnnnnnnnnnnnnnnnnnnnnnnnnnnnnnnnnnnnnnnnnnnnnnnnnnnnnnnnnnnnnnnnnnnnnnnnnnnnnnnnnnnnnnnnnnnnnnnnnnnnnnnnnnnnnnnnnnnnnnnnnnnnnnnnnnnnnnnnnnnnnnnnnnnnnnnnnnnnnnnnnnnnnnnnnnnnnnnnnnnnnnnnnnnnnnnnnnnnnnnnnnnnnnnnnnnnnnnnnnnnnnnnnnnnnnnnnnnnnnnnnnnnnnnnnnnnnnnnnnnnnnnnnnnnnnnnnnnnnnnnnnnnnnnnnnnnnnnnnnnnnnnnnnnnnnnnnnnnnnnnnnnnnnnnnnnnnnnnnnnnnnnnnnnnnnnnnnnnnnnnnnnnnnnnnnnnnnnnnnnnnnnnnnnnnnnnnnnnnnnnnnnnnnnnnnnnnnnnnnnnnnnnnnnnnnnnnnnnnnnnnnnnnnnnnnnnnnnnnnnnnnnnnnnnnnnnnnnnnnnnnnnnnnnnnnnnnnnnnnnnnnnnnnnnnnnnnnnnnnnnnnnnnnnnnnnnnnnnnnnnnnnnnnnnnnnnnnnnnnnnnnnnnnnnnnnnnnnnnnnnnnnnnnnnnnnnnnnnnnnnnnnnnnnnnnnnnnnnnnnnnnnnnnnnnnnnnnnnnnnnnnnnnnnnnnnnnnnnnnnnnnnnnnnnnnnnnnnnnnnnnnnnnnnnnnnnnnnnnnnnnnnnnnnnnnnnnnnnnnnnnnnnnnnnnnnnnnnnnnnnnnnnnnnnnnnnnnnnnnnnnnnnnnnnnnnnnnnnnnnnnnnnnnnnnnnnnnnnnnnnnnnnnnnnnnnnnnnnnnnnnnnnnnnnnnnnnnnnnnnnnnnnnnnnnnnnnnnnnnnnnnnnnnnnnnnnnnnnnnnnnnnnnnnnnnnnnnnnnnnnnnnnnnnnnnnnnnnnnnnnnnnnnnnnnnnnnnnnnnnnnnnnnnnnnnnnnnnnnnnnnnnnnnnnnnnnnnnnnnnnnnnnnnnnnnnnnnnnnnnnnnnnnnnnnnnnnnnnnnnnnnnnnnnnnnnnnnnnnnnnnnnnnnnnnnnnnnnnnnnnnnnnnnnnnnnnnnnnnnnnnnnnnnnnnnnnnnnnnnnnnnnnnnnnnnnnnnnnnnnnnnnnnnnnnnnnnnnnnnnnnnnnnnnnnnnnnnnnnnnnnnnnnnnnnnnnnnnnnnnnnnnnnnnnnnnnnnnnnnnnnnnnnnnnnnnnnnnnnnnnnnnnnnnnnnnnnnnnnnnnnnnnnnnnnnnnnnnnnnnnnnnnnnnnnnnnnnnnnnnnnnnnnnnnnnnnnnnnnnnnnnnnnnnnnnnnnnnnnnnnnnnnnnnnnnnnnnnnnnnnnnnnnnnnnnnnnnnnnnnnnnnnnnnnnnnnnnnnnnnnnnnnnnnnnnnnnnnnnnnnnnnnnnnnnnnnnnnnnnnnnnnnnnnnnnnnnnnnnnnnnnnnnnnnnnnnnnnnnnnnnnnnnnnnnnnnnnnnnnnnnnnnnnnnnnnnnnnnnnnnnnnnnnnnnnnnnnnnnnnnnnnnnnnnnnnnnnnnnnnnnnnnnnnnnnnnnnnnnnnnnnnnnnnnnnnnnnnnnnnnnnnnnnnnnnnnnnnnnnnnnnnnnnnnnnnnnnnnnnnnnnnnnnnnnnnnnnnnnnnnnnnnnnnnnnnnnnnnnnnnnnnnnnnnnnnnnnnnnnnnnnnnnnnnnnnnnnnnnnnnnnnnnnnnnnnnnnnnnnnnnnnnnnnnnnnnnnnnnnnnnnnnnnnnnnnnnnnnnnnnnnnnnnnnnnnnnnnnnnnnnnnnnnnnnnnnnnnnnnnnnnnnnnnnnnnnnnnnnnnnnnnnnnnnnnnnnnnnnnnnnnnnnnnnnnnnnnnnnnnnnnnnnnnnnnnnnnnnnnnnnnnnnnnnnnnnnnnnnnnnnnnnnnnnnnnnnnnnnnnnnnnnnnnnnnnnnnnnnnnnnnnnnnnnnnnnnnnnnnnnnnnnnnnnnnnnnnnnnnnnnnnnnnnnnnnnnnnnnnnnnnnnnnnnnnnnnnnnnnnnnnnnnnnnnnnnnnnnnnnnnnnnnnnnnnnnnnnnnnnnnnnnnnnnnnnnnnnnnnnnnnnnnnnnnnnnnnnnnnnnnnnnnnnnnnnnnnnnnnnnnnnnnnnnnnnnnnnnnnnnnnnnnnnnnnnnnnnnnnnnnnnnnnnnnnnnnnnnnnnnnnnnnnnnnnnnnnnnnnnnnnnnnnnnnnnnnnnnnnnnnnnnnnnnnnnnnnnnnnnnnnnnnnnnnnnnnnnnnnnnnnnnnnnnnnnnnnnnnnnnnnnnnnnnnnnnnnnnnnnnnnnnnnnnnnnnnnnnnnnnnnnnnnnnnnnnnnnnnnnnnnnnnnnnnnnnnnnnnnnnnnnnnnnnnnnnnnnnnnnnnnnnnnnnnnnnnnnnnnnnnnnnnnnnnnnnnnnnnnnnnnnnnnnnnnnnnnnnnnnnnnnnnnnnnnnnnnnnnnnnnnnnnnnnnnnnnnnnnnnnnnnnnnnnnnnnnnnnnnnnnnnnnnnnnnnnnnnnnnnnnnnnnnnnnnnnnnnnnnnnnnnnnnnnnnnnnnnnnnnnnnnnnnnnnnnnnnnnnnnnnnnnnnnnnnnnnnnnnnnnnnnnnnnnnnnnnnnnnnnnnnnnnnnnnnnnnnnnnnnnnnnnnnnnnnnnnnnnnnnnnnnnnnnnnnnnnnnnnnnnnnnnnnnnnnnnnnnnnnnnnnnnnnnnnnnnnnnnnnnnnnnnnnnnnnnnnnnnnnnnnnnnnnnnnnnnnnnnnnnnnnnnnnnnnnnnnnnnnnnnnnnnnnnnnnnnnnnnnnnnnnnnnnnnnnnnnnnnnnnnnnnnnnnnnnnnnnnnnnnnnnnnnnnnnnnnnnnnnnnnnnnnnnnnnnnnnnnnnnnnnnnnnnnnnnnnnnnnnnnnnnnnnnnnnnnnnnnnnnnnnnnnnnnnnnnnnnnnnnnnnnnnnnnnnnnnnnnnnnnnnnnnnnnnnnnnnnnnnnnnnnnnnnnnnnnnnnnnnnnnnnnnnnnnnnnnnnnnnnnnnnnnnnnnnnnnnnnnnnnnnnnnnnnnnnnnnnnnnnnnnnnnnnnnnnnnnnnnnnnnnnnnnnnnnnnnnnnnnnnnnnnnnnnnnnnnnnnnnnnnnnnnnnnnnnnnnnnnnnnnnnnnnnnnnnnnnnnnnnnnnnnnnnnnnnnnnnnnnnnnnnnnnnnnnnnnnnnnnnnnnnnnnnnnnnnnnnnnnnnnnnnnnnnnnnnnnnnnnnnnnnnnnnnnnnnnnnnnnnnnnnnnnnnnnnnnnnnnnnnnnnnnnnnnnnnnnnnnnnnnnnnnnnnnnnnnnnnnnnnnnnnnnnnnnnnnnnnnnnnnnnnnnnnnnnnnnnnnnnnnnnnnnnnnnnnnnnnnnnnnnnnnnnnnnnnnnnnnnnnnnnnnnnnnnnnnnnnnnnnnnnnnnnnnnnnnnnnnnnnnnnnnnnnnnnnnnnnnnnnnnnnnnnnnnnnnnnnnnnnnnnnnnnnnnnnnnnnnnnnnnnnnnnnnnnnnnnnnnnnnnnnnnnnnnnnnnnnnnnnnnnnnnnnnnnnnnnnnnnnnnnnnnnnnnnnnnnnnnnnnnnnnnnnnnnnnnnnnnnnnnnnnnnnnnnnnnnnnnnnnnnnnnnnnnnnnnnnnnnnnnnnnnnnnnnnnnnnnnnnnnnnnnnnnnnnnnnnnnnnnnnnnnnnnnnnnnnnnnnnnnnnnnnnnnnnnnnnnnnnnnnnnnnnnnnnnnnnnnnnnnnnnnnnnnnnnnnnnnnnnnnnnnnnnnnnnnnnnnnnnnnnnnnnnnnnnnnnnnnnnnnnnnnnnnnnnnnnnnnnnnnnnnnnnnnnnnnnnnnnnnnnnnnnnnnnnnnnnnnnnnnnnnnnnnnnnnnnnnnnnnnnnnnnnnnnnnnnnnnnnnnnnnnnnnnnnnnnnnnnnnnnnnnnnnnnnnnnnnnnnnnnnnnnnnnnnnnnnnnnnnnnnnnnnnnnnnnnnnnnnnnnnnnnnnnnnnnnnnnnnnnnnnnnnnnnnnnnnnnnnnnnnnnnnnnnnnnnnnnnnnnnnnnnnnnnnnnnnnnnnnnnnnnnnnnnnnnnnnnnnnnnnnnnnnnnnnnnngacttaatcgcctgctcgattgacacctacctttggagccgctcgctctgnnnnnnnnnnnnnnnnnnnnnnnnnnnnnnnnnnnnnnnnnnnnnnnnnnnnnnnnnnnnnngccgcggcaaccccacaaggcgccacctcaccaggccctcagtgccccactcactccctcggagcgaccaatggttggctggcaaccgtaacgacagaccttgtttcctttcattattgatatgcagaacccgctccaggagtaatnnnnnnnnnnnnnnnnnnnnnnnnnnnnnnnnnnnnnnnnnnnnnnnnnnnnnnnnnnnnnnnnnnnnnnnnnnnnnnnnnnnnnnnnnnnnnnnnnnnnnnnnnnnnnnnnnnnnnnnnnnnnnnnnnnnnnnnnnnnnnnnnnnnnnnnnnnnnnnnnnnnnnnnnnnnnnnnnnnnnnnnnnnnnnnnnnnnnnnnnnnnnnnnnnnnnnnnnnnnnnnnnnnnnnnnnnnnnnnnnnnnnnnnnnnnnnnnnnnnnnnnnnnnnnnnnnnnnnnnnnnnnnnnnnnnnnnnnnnnnnnnnnnnnnnnnnnnnnnnnnnnnnnnnnnnnnnnnnnnnnnnnnnnnnnnnnnnnnnnnnnnnnnnnnnnnnnnnnnnnnnnnnnnnnnnnnnnnnnnnnnnnnnnnnnnnnnnnnnnnnnnnnnnnnnnnnnnnnnnnnnnnnnnnnnnnnnnnnnnnnnnnnnnnnnnnnnnnnnnnnnnnnnnnnnnnnnnnnnnnnnnnnnnnnnnnnnnnnnnnnnnnnnnnnnnnnnnnnnnnnnnnnnnnnnnnnnnnnnnnnnnnnnnnnnnnnnnnnnnnnnnnnnnnnnnnnnnnnnnnnnnnnnnnnnnnnnnnnnnnnnnnnnnnnnnnnnnnnnnnnnnnnnnnnnnnnnnnnnnnnnnnnnnnnnnnnnnnnnnnnnnnnnnnnnnnnnnnnnnnnnnnnnnnnnnnnnnnnnnnnnnnnnnnnnnnnnnnnnnnnnnnnnnnnnnnnnnnnnnnnnnnnnnnnnnnnnnnnnnnnnnnnnnnnnnnnnnnnnnnnnnnnnnnnnnnnnnnnnnnnnnnnnnnnnnnnnnnnnnnnnnnnnnnnnnnnnnnnnnnnnnnnnnnnnnnnnnnnnnnnnnnnnnnnnnnnnnnnnnnnnnnnnnnnnnnnnnnnnnnnnnnnnnnnnnnnnnnnnnnnnnnnnnnnnnnnnnnnnnnnnnnnnnnnnnnnnnnnnnnnnnnnnnnnnnnnnnnnnnnnnnnnnnnnnnnnnnnnnnnnnnnnnnnnnnnnnnnnnnnnnnnnnnnnnnnnnnnnnnnnnnnnnnnnnnnnnnnnnnnnnnnnnnnnnnnnnnnnnnnnnnnnnnnnnnnnnnnnnnnnnnnnnnnnnnnnnnnnnnnnnnnnnnnnnnnnnnnnnnnnnnnnnnnnnnnnnnnnnnnnnnnnnnnnnnnnnnnnnnnnnnnnnnnnnnnnnnnnnnnnnnnnnnnnnnnnnnnnnnnnnnnnnnnnnnnnnnnnnnnnnnnnnnnnnnnnnnnnnnnnnnnnnnnnnnnnnnnnnnnnnnnnnnnnnnnnnnnnnnnnnnnnnnnnnnnnnnnnnnnnnnnnnnnnnnnnnnnnnnnnnnnnnnnnnnnnnnnnnnnnnnnnnnnnnnnnnnnnnnnnnnnnnnnnnnnnnnnnnnnnnnnnnnnnnnnnnnnnnnnnnnnnnnnnnnnnnnnnnnnnnnnnnnnnnnnnnnnnnnnnnnnnnnnnnnnnnnnnnnnnnnnnnnnnnnnnnnnnnnnnnnnnnnnnnnnnnnnnnnnnnnnnnnnnnnnnnnnnnnnnnnnnnnnnnnnnnnnnnnnnnnnnnnnnnnnnnnnnnnnnnnnnnnnnnnnnnnnnnnnnnnnnnnnnnnnnnnnnnnnnnnnnnnnnnnnnnnnnnnnnnnnnnnnnnnnnnnnnnnnnnnnnnnnnnnnnnnnnnnnnnnnnnnnnnnnnnnnnnnnnnnnnnnnnnnnnnnnnnnnnnnnnnnnnnnnnnnnnnnnnnnnnnnnnnnnnnnnnnnnnnnnnnnnnnnnnnnnnnnnnnnnnnnnnnnnnnnnnnnnnnnnnnnnnnnnnnnnnnnnnnnnnnnnnnnnnnnnnnnnnnnnnnnnnnnnnnnnnnnnnnnnnnnnnnnnnnnnnnnnnnnnnnnnnnnnnnnnnnnnnnnnnnnnnnnnnnnnnnnnnnnnnnnnnnnnnnnnnnnnnnnnnnnnnnnnnnnnnnnnnnnnnnnnnnnnnnnnnnnnnnnnnnnnnnnnnnnnnnnnnnnnnnnnnnnnnnnnnnnnnnnnnnnnnnnnnnnnnnnnnnnnnnnnnnnnnnnnnnnnnnnnnnnnnnnnnnnnnnnnnnnnnnnnnnnnnnnnnnnnnnnnnnnnnnnnnnnnnnnnnnnnnnnnnnnnnnnnnnnnnnnnnnnnnnnnnnnnnnnnnnnnnnnnnnnnnnnnnnnnnnnnnnnnnnnnnnnnnnnnnnnnnnnnnnnnnnnnnnnnnnnnnnnnnnnnnnnnnnnnnnnnnnnnnnnnnnnnnnnnnnnnnnnnnnnnnnnnnnnnnnnnnnnnnnnnnnnnnnnnnnnnnnnnnnnnnnnnnnnnnnnnnnnnnnnnnnnnnnnnnnnnnnnnnnnnnnnnnnnnnnnnnnnnnnnnnnnnnnnnnnnnnnnnnnnnnnnnnnnnnnnnnnnnnnnnnnnnnnnnnnnnnnnnnnnnnnnnnnnnnnnnnnnnnnnnnnnnnnnnnnnnnnnnnnnnnnnnnnnnnnnnnnnnnnnnnnnnnnnnnnnnnnnnnnnnnnnnnnnnnnnnnnnnnnnnnnnnnnnnnnnnnnnnnnnnnnnnnnnnnnnnnnnnnnnnnnnnnnnnnnnnnnnnnnnnnnnnnnnnnnnnnnnnnnnnnnnnnnnnnnnnnnnnnnnnnnnnnnnnnnnnnnnnnnnnnnnnnnnnnnnnnnnnnnnnnnnnnnnnnnnnnnnnnnnnnnnnnnnnnnnnnnnnnnnnnnnnnnnnnnnnnnnnnnnnnnnnnnnnnnnnnnnnnnnnnnnnnnnnnnnnnnnnnnnnnnnnnnnnnnnnnnnnnnnnnnnnnnnnnnnnnnnnnnnnnnnnnnnnnnnnnnnnnnnnnnnnnnnnnnnnnnnnnnnnnnnnnnnnnncgaccggctcaaccatactgattaaactgccccttggggactacggagtaggccggacttcttacatattttatccatctatgttactaatgtcactaattttttttctaattctacagcgtattcatcataagcaatagacttggaggctggcatagtaaagataaatgaatacagagaaagggttgtacctcaaatttttggtgcatctgcttcaccatgtctgtctcgaggttacgactgctgtgcacttggctcatgtagccagaaaagacttctccaatactcatgtgagtatagtctgcgacgtcaagcttgactcggcggtgttccagaagctcctccttggcagaacatttggccaacacggttggcctccccggctcagcaaagctagttctggtgatctcgacatcagtgtcttgaggatcattcgtcctgaccgggctaggggctttcaggttttccgaaccatcaatggctcactcagcaggcgggtcagcaattggagttggtgtgtcttgagccggttcaggtggcggctcatgagttgaagattcaggcgcggctgttccaagttctggctctgttatgaccgtttcttcagccgacttgtcctnnnnnnnnnnnnnnnnnnnnnnnnnnnnnnnnnnnnnnnnnnnnnnnnnnnnnnnnnnnnnnnnnnnnnnnnnnnnnnnnnnnnnnnnnnnnnnnnnnnnnnnnnnnnnnnnnnnnnnnnnnnnnnnnnnnnnnnnnnnnnnnnnnnnnnnnnnnnnnnnnnnnnnnnnnnnnnnnnnnnnnnnnnnnnnnnnnnnnnnnnnnnnnnnnnnnnnnnnnnnnnnnnnnnnnnnnnnnnnnnnnnnnnnnnnnnnnnnnnnnnnnnnnnnnnnnnnnnnnnnnnnnnnnnnnnnnnnnnnnnnnnnnnnnnnnnnnnnnnnnnnnnnnnnnnnnnnnnnnnnnnnnnnnnnnnnnnnnnnnnnnnnnnnnnnnnnnnnnnnnnnnnnnnnnnnnnnnnnnnnnnnnnnnnnnnnnnnnnnnnnnnnnnnnnnnnnnnnnnnnnnnnnnnnnnnnnnnnnnnnnnnnnnnnnnnnnnnnnnnnnnnnnnnnnnnnnnnnnnnnnnnnnnnnnnnnnnnnnnnnnnnnnnnnnnnnnnnnnnnnnnnnnnnnnnnnnnnnnnnnnnncgactcagaagaatcttctagcctaagcaagtcagaggcggtggctttattgcccttcttttttgcagcctctttcctggcggctttcttggccttcctggctttctttgcagcttcatggtcatatttgaccttccagaatttgtcacccgcctgtgagagttagcagaggtatgagtatgggtaaaacatcgaaaaaccaaagtaatttattcnnnnnnnnnnnnnnnnnnnnnnnnnnnnnnnnnnnnnnnnnnnnnnnnnnnnnnnnnnnnnnnnnnnnnnnnnnnnnnnnnnnnnnnnnnnnnnnnnnnnnnnnnnnnnnnnnnnnnnnnnnnnnnnnnnnnnnnnnnnnnnnnnnnnnnnnnnnnnnnnnnnnnnnnnnnnnnnnnnnnnnnnnnnnnnnnnnnnnnnnnnnnnnnnnnnnnnnnnnnnnnnnnnnnnnnnnnnnnnnnnnnnnnnnnnnnnnnnnnnnnnnnnnnnnnnnnnnnnnnnnnnnnnnnnnnnnnnnnnnnnnnnnnnnnnnnnnnnnnnnnnnnnnnnnnnnnnnnnnnnnnnnnnnnnnnnnnnnnnnnnnnnnnnnnnnnnnnnnnnnnnnnnnnnnnnnnnnnnnnnnnnnnnnnnnnnnnnnnnnnnnnnnnnnnnnnnnnnnnnnnnnnnnnnnnnnnnnnnnnnnnnnnnnnnnnnnnnnnnnnnnnnnnnnnnnnnnnnnnnnnnnnnnnnnnnnnnnnnnnnnnnnnnnnnnnnnnnnnnnnnnnnnnnnnnnnnnnnnnnnnnnnnnnnnnnnnnnnnnnnnnnnnnnnnnnnnnnnnnnnnnnnnnnnnnnnnnnnnnnnnnnnnnnnnnnnnnnnnnnnnnnnnnnnnnnnnnnnnnnnnnnnnnnnnnnnnnnnnnnnnnnnnnnnnnnnnnnnnnnnnnnnnnnnnnnnnnnnnnnnnnnnnnnnnnnnnnnnnnnnnnnnnnnnnnnnnnnnnnnnnnnnnnnnnnnnnnnnnnnnnnnnnnnnnnnnnnnnnnnnnnnnnnnnnnnnnnnnnnnnnnnnnnnnnnnnnnnnnnnnnnnnnnnnnnnnnnnnnnnnnnnnnnnnnnnnnnnnnnnnnnnnnnnnnnnnnnnnnnnnnnnnnnnnnnnnnnnnnnnnnnnnnnnnnnnnnnnnnnnnnnnnnnnnnnnnnnnnnnnnnnnnnnnnnnnnnnnnnnnnnnnnnnnnnnnnnnnnnnnnnnnnnnnnnnnnnnnnnnnnnnnnnnnnnnnnnnnnnnnnnnnnnnnnnnnnnnnnnnnnnnnnnnnnnnnnnnnnnnnnnnnnnnnnnnnnnnnnnnnnnnnnnnnnnnnnnnnnnnnnnnnnnnnnnnnnnnnnnnnnnnnnnnnnnnnnnnnnnnnnnnnnnnnnnnnnnnnnnnnnnnnnnnnnnnnnnnnnnnnnnnnnnnnnnnnnnnnnnnnnnnnnnnnnnnnnnnnnnnnnnnnnnnnnnnnnnnnnnnnnnnnnnnnnnnnnnnnnnnnnnnnnnnnnnnnnnnnnnnnnnnnnnnnnnnnnnnnnnnnnnnnnnnnnnnnnnnnnnnnnnnnnnnnnnnnnnnnnnnnnnnnnnnnnnnnnnnnnnnnnnnnnnnnnnnnnnnnnnnnnnnnnnnnnnnnnnnnnnnnnnnnnnnnnnnnnnnnnnnnnnnnnnnnnnnnnnnnnnnnnnnnnnnnnnnnnnnnnnnnnnnnnnnnnnnnnnnnnnnnnnnnnnnnnnnnnnnnnnnnnnnnnnnnnnnnnnnnnnnnnnnnnnnnnnnnnnnnnnnnnnnnnnnnnnnnnnnnnnnnnnnnnnnnnnnnnnnnnnnnnnnnnnnnnnnnnnnnnnnnnnnnnnnnnnnnnnnnnnnnnnnnnnnnnnnnnnnnnnnnnnnnnnnnnnnnnnnnnnnnnnnnnnnnnnnnnnnnnnnnnnnnnnnnnnnnnnnnnnnnnnnnnnnnnnnnnnnnnnnnnnnnnnnnnnnnnnnnnnnnnnnnnnnnnnnnnnnnnnnnnnnnnnnnnnnnnnnnnnnnnnnnnnnnnnnnnnnnnnnnnnnnnnnnnnnnnnnnnnnnnnnnnnnnnnnnnnnnnnnnnnnnnnnnnnnnnnnnnnnnnnnnnnnnnnnnnnnnnnnnnnnnnnnnnnnnnnnnnnnnnnnnnnnnnnnnnnnnnnnnnnnnnnnnnnnnnnnnnnnnnnnnnnnnnnnnnnnnnnnnnnnnnnnnnnnnnnnnnnnnnnnnnnnnnnnnnnnnnnnnnnnnnnnnnnnnnnnnnnnnnnnnnnnnnnnnnnnnnnnnnnnnnnnnnnnnnnnnnnnnnnnnnnnnnnnnnnnnnnnnnnnnnnnnnnnnnnnnnnnnnnnnnnnnnnnnnnnnnnnnnnnnnnnnnnnnnnnnnnnnnnnnnnnnnnnnnnnnnnnnnnnnnnnnnnnnnnnnnnnnnnnnnnnnnnnnnnnnnnnnnnnnnnnnnnnnnnnnnnnnnnnnnnnnnnnnnnnnnnnnnnnnnnnnnnnnnnnnnnnnnnnnnnnnnnnnnnnnnnnnnnnnnnnnnnnnnnnnnnnnnnnnnnnnnnnnnnnnnnnnnnnnnnnnnnnnnnnnnnnnnnnnnnnnnnnnnnnnnnnnnnnnnnnnnnnnnnnnnnnnnnnnnnnnnnnnnnnnnnnnnnnnnnnnnnnnnnnnnnnnnnnnnnnnnnnnnnnnnnnnnnnnnnnnnnnnnnnnnnnnnnnnnnnnnnnnnnnnttgctgggtccaccnnnnnnnnnnnnnnnnnnnnnnnnnnnnnnnnnnnnnnnnnnnnnnnnnnnnnnnnnnnnnnnnnnnnnnnnnnnnnnnnnnnnnnnnnnnnnnnnnnnnnnnnnnnnnnnnnnnnnnnnnnnnnnnnnnnnnnnnnnnnnnnnnnnnnnnnnnnnnnnnnnnnnnnnnnnnnnnnnnnnnnnnnnnnnnnnnnnnnnnnnnnnnnnnnnnnnnnnnnnnnnnnnnnnnnnnnnnnnnnnnnnnnnnnnnnnnnnnnnnnnnnnnnnnnnnnnnnnnnnnnnnnnnnnnnnnnnnnnnnnnnnnnnnnnnnnnnnnnnnnnnnnnnnnnnnnnnnnnnnnnnnnnnnnnnnnnnnnnnnnnnnnnnnnnnnnnnnnnnnnnnnnnnnnnnnnnnnnnnnnnnnnnnnnnnnnnnnnnnnnnnnnnnnnnnnnnnnnnnnnnnnnnnnnnnnnnnnnnnnnnnnnnnnnnnnnnnnnnnnnnnnnnnnnnnnnnnnnnnnnnnnnnnnnnnnnnnnnnnnnnnnnnnnnnnnnnnnnnnnnnnnnnnnnnnnnnnnnnnnnnnnnnnnnnnnnnnnnnnnnnnnnnnnnnnnnnnnnnnnnnnnnnnnnnnnnnnnnnnnnnnnnnnnnnnnnnnnnnnnnnnnnnnnnnnnnnnnnnnnnnnnnnnnnnnnnnnnnnnnnnnnnnnnnnnnnnnnnnnnnnnnnnnnnnnnnnnnnnnnnnnnnnnnnnnnnnnnnnnnnnnnnnnnnnnnnnnnnnnnnnnnnnnnnnnnnnnnnnnnnnnnnnnnnnnnnnnnnnnnnnnnnnnnnnnnnnnnnnnnnnnnnnnnnnnnnnnnnnnnnnnnnnnnnnnnnnnnnnnnnnnnnnnnnnnnnnnnnnnnnnnnnnnnnnnnnnnnnnnnnnnnnnnnnnnnnnnnnnnnnnnnnnnnnnnnnnnnnnnnnnnnnnnnnnnnnnnnnnnnnnnnnnnnnnnnnnnnnnnnnnnnnnnnnnnnnnnnnnnnnnnnnnnnnnnnnnnnnnnnnnnnnnnnnnnnnnnnnnnnnnnnnnnnnnnnnnnnnnnnnnnnnnnnnnnnnnnnnnnnnnnnnnnnnnnnnnnnnnnnnnnnnnnnnnnnnnnnnnnnnnnnnnnnnnnnnnnnnnnnnnnnnnnnnnnnnnnnnnnnnnnnnnnnnnnnnnnnnnnnnnnnnnnnnnnnnnnnnnnnnnnnnnnnnnnnnnnnnnnnnnnnnnnnnnnnnnnnnnnnnnnnnnnnnnnnnnnnnnnnnnnnnnnnnnnnnnnnnnnnnnnnnnnnnnnnnnnnnnnnnnnnnnnnnnnnnnnnnnnnnnnnnnnnnnnnnnnnnnnnnnnnnnnnnnnnnnnnnnnnnnnnnnnnnnnnnnnnnnnnnnnnnnnnnnnnnnnnnnnnnnnnnnnnnnnnnnnnnnnnnnnnnnnnnnnnnnnnnnnnnnnnnnnnnnnnnnnnnnnnnnnnnnnnnnnnnnnnnnnnnnnnnnnnnnnnnnnnnnnnnnnnnnnnnnnnnnnnnnnnnnnnnnnnnnnnnnnnnnnnnnnnnnnnnnnnnnnnnnnnnnnnnnnnnnnnnnnnnnnnnnnnnnnnnnnnnnnnnnnnnnnnnnnnnnnnnnnnnnnnnnnnnnnnnnnnnnnnnnnnnnnnnnnnnnnnnnnnnnnnnnnnnnnnnnnnnnnnnnnnnnnnnnnnnnnnnnnnnnnnnnnnnnnnnnnnnnnnnnnnnnnnnnnnnnnnnnnnnnnnnnnnnnnnnnnnnnnnnnnnnnnnnnnnnnnnnnnnnnnnnnnnnnnnnnnnnnnnnnnnnnnnnnnnnnnnnnnnnnnnnnnnnnnnnnnnnnnnnnnnnnnnnnnnnnnnnnnnnnnnnnnnnnnnnnnnnnnnnnnnnnnnnnnnnnnnnnnnnnnnnnnnnnnnnnnnnnnnnnnnnnnnnnnnnnnnnnnnnnnnnnnnnnnnnnnnnnnnnnnnnnnnnnnnnnnnnnnnnnnnnnnnnnnnnnnnnnnnnnnnnnnnnnnnnnnnnnnnnnnnnnnnnnnnnnnnnnnnnnnnnnnnnnnnnnnnnnnnnnnnnnnnnnnnnnnnnnnnnnnnnnnnnnnnnnnnnnnnnnnnnnnnnnnnnnnnnnnnnnnnnnnnnnnnnnnnnnnnnnnnnnnnnnnnnnnnnnnnnnnnnnnnnnnnnnnnnnnnnnnnnnnnnnnnnnnnnnnnnnnnnnnnnnnnnnnnnnnnnnnnnnnnnnnnnnnnnnnnnnnnnnnnnnnnnnnnnnnnnnnnnnnnnnnnnnnnnnnnnnnnnnnnnnnnnnnnnnnnnnnnnnnnnnnnnnnnnnnnnnnnnnnnnnnnnnnnnnnnnnnnnnnnnnnnnnnnnnnnnnnnnnnnnnnnnnnnnnnnnnnnnnnnnnnnnnnnnnnnnnnnnnnnnnnnnnnnnnnnnnnnnnnnnnnnnnnnnnnnnnnnnnnnnnnnnnnnnnnnnnnnnnnnnnnnnnnnnnnnnnnnnnnnnnnnnnnnnnnnnnnnnnnnnnnnnnnnnnnnnnnnnnnnnnnnnnnnnnnnnnnnnnnnnnnnnnnnnnnnnnnnnnnnnnnnnnnnnnnnnnnnnnnnnnnnnnnnnnnnnnnnnnnnnnnnnnnnnnnnnnnnnnnnnnnnnnnnnnnnnnnnnnnnnnnnnnnnnnnnnnnnnnnnnnnnnnnnnnnnnnnnnnnnnnnnnnnnnnnnnnnnnnnnnnnnnnnnnnnnnnnnnnnnnnnnnnnnnnnnnnnnnnnnnnnnnnnnnnnnnnnnnnnnnnnnnnnnnnnnnnnnnnnnnnnnnnnnnnnnnnnnnnnnnnnnnnnnnnnnnnnnnnnnnnnnnnnnnnnnnnnnnnnnnnnnnnnnnnnnnnnnnnnnnnnnnnnnnnnnnnnnnnnnnnnnnnnnnnnnnnnnnnnnnnnnnnnnnnnnnnnnnnnnnnnnnnnnnnnnnnnnnnnnnnnnnnnnnnnnnnnnnnnnnnnnnnnnnnnnnnnnnnnnnnnnnnnnnnnnnnnnnnnnnnnnnnnnnnnnnnnnnnnnnnnnnnnnnnnnnnnnnnnnnnnnnnnnnnnnnnnnnnnnnnnnnnnnnnnnnnnnnnnnnnnnnnnnnnnnnnnnnnnnnnnnnnnnnnnnnnnnnnnnnnnnnnnnnnnnnnnnnnnnnnnnnnnnnnnnnnnnnnnnnnnnnnnnnnnnnnnnnnnnnnnnnnnnnnnnnnnnnnnnnnnnnnnnnnnnnnnnnnnnnnnnnnnnnnnnnnnnnnnnnnnnnnnnnnnnnnnnnnnnnnnnnnnnnnnnnnnnnnnnnnnnnnnnnnnnnnnnnnnnnnnnnnnnnnnnnnnnnnnnnnnnnnnnnnnnnnnnnnnnnnnnnnnnnnnnnnnnnnnnnnnnnnnnnnnnnnnnnnnnnnnnnnnnnnnnnnnnnnnnnnnnnnnnnnnnnnnnnnnnnnnnnnnnnnnnnnnnnnnnnnnnnnnnnnnnnnnnnnnnnnnnnnnnnnnnnnnnnnnnnnnnnnnnnnnnnnnnnnnnnnnnnnnnnnnnnnnnnnnnnnnnnnnnnnnnnnnnnnnnnnnnnnnnnnnnnnnnnnnnnnnnnnnnnnnnnnnnnnnnnnnnnnnnnnnnnnnnnnnnnnnnnnnnnnnnnnnnnnnnnnnnnnnnnnnnnnnnnnnnnnnnnnnnnnnnnnnnnnnnnnnnnnnnnnnnnnnnnnnnnnnnnnnnnnnnnnnnnnnnnnnnnnnnnnnnnnnnnnnnnnnnnnnnnnnnnnnnnnnnnnnnnnnnnnnnnnnnnnnnnnnnnnnnnnnnnnnnnnnnnnnnnnnnnnnnnnnnnnnnnnnnnnnnnnnnnnnnnnnnnnnnnnnnnnnnnnnnnnnnnnnnnnnnnnnnnnnnnnnnnnnnnnnnnnnnnnnnnnnnnnnnnnnnnnnnnnnnnnnnnnnnnnnnnnnnnnnnnnnnnnnnnnnnnnnnnnnnnnnnnnnnnnnnnnnnnnnnnnnnnnnnnnnnnnnnnnnnnnnnnnnnnnnnnnnnnnnnnnnnnnnnnnnnnnnnnnnnnnnnnnnnnnnnnnnnnnnnnnnnnnnnnnnnnnnnnnnnnnnnnnnnnnnnnnnnnnnnnnnnnnnnnnnnnnnnnnnnnnnnnnnnnnnnnnnnnnnnnnnnnnnnnnnnnnnnnnnnnnnnnnnnnnnnnnnnnnnnnnnnnnnnnnnnnnnnnnnnnnnnnnnnnnnnnnnnnnnnnnnnnnnnnnnnnnnnnnnnnnnnnnnnnnnnnnnnnnnnnnnnnnnnnnnnnnnnnnnnnnnnnnnnnnnnnnnnnnnnnnnnnnnnnnnnnnnnnnnnnnnnnnnnnnnnnnnnnnnnnnnnnnnnnnnnnnnnnnnnnnnnnnnnnnnnnnnnnnnnnnnnnnnnnnnnnnnnnnnnnnnnnnnnnnnnnnnnnnnnnnnnnnnnnnnnnnnnnnnnnnnnnnnnnnnnnnnnnnnnnnnnnnnnnnnnnnnnnnnnnnnnnnnnnnnnnnnnnnnnnnnnnnnnnnnnnnnnnnnnnnnnnnnnnnnnnnnnnnnnnnnnnnnnnnnnnnnnnnnnnnnnnnnnnnnnnnnnnnnnnnnnnnnnnnnnnnnnnnnnnnnnnnnnnnnnnnnnnnnnnnnnnnnnnnnnnnnnnnnnnnnnnnnnnnnnnnnnnnnnnnnnnnnnnnnnnnnnnnnnnnnnnnnnnnnnnnnnnnnnnnnnnnnnnnnnnnnnnnnnnnnnnnnnnnnnnnnnnnnnnnnnnnnnnnnnnnnnnnnnnnnnnnnnnnnnnnnnnnnnnnnnnnnnnnnnnnnnnnnnnnnnnnnnnnnnnnnnnnnnnnnnnnnnnnnnnnnnnnnnnnnnnnnnnnnnnnnnnnnnnnnnnnnnnnnnnnnnnnnnnnnnnnnnnnnnnnnnnnnnnnnnnnnnnnnnnnnnnnnnnnnnnnnnnnnnnnnnnnnnnnnnnnnnnnnnnnnnnnnnnnnnnnnnnnnnnnnnnnnnnnnnnnnnnnnnnnnnnnnnnnnnnnnnnnnnnnnnnnnnnnnnnnnnnnnnnnnnnnnnnnnnnnnnnnnnnnnnnnnnnnnnnnnnnnnnnnnnnnnnnnnnnnnnnnnnnnnnnnnnnnnnnnnnnnnnnnnnnnnnnnnnnnnnnnnnnnnnnnnnnnnnnnnnnnnnnnnnnnnnnnnnnnnnnnnnnnnnnnnnnnnnnnnnnnnnnnnnnnnnnnnnnnnnnnnnnnnnnnnnnnnnnnnnnnnnnnnnnnnnnnnnnnnnnnnnnnnnnnnnnnnnnnnnnnnnnnnnnnnnnnnnnnnnnnnnnnnnnnnnnnnnnnnnnnnnnnnnnnnnnnnnnnnnnnnnnnnnnnnnnnnnnnnnnnnnnnnnnnnnnnnnnnnnnnnnnnnnnnnnnnnnnnnnnnnnnnnnnnnnnnnnnnnnnnnnnnnnnnnnnnnnnnnnnnnnnnnnnnnnnnnnnnnnnnnnnnnnnnnnnnnnnnnnnnnnnnnnnnnnnnnnnnnnnnnnnnnnnnnnnnnnnnnnnnnnnnnnnnnnnnnnnnnnnnnnnnnnnnnnnnnnnnnnnnnnnnnnnnnnnnnnnnnnnnnnnnnnnnnnnnnnnnnnnnnnnnnnnnnnnnnnnnnnnnnnnnnnnnnnnnnnnnnnnnnnnnnnnnnnnnnnnnnnnnnnnnnnnnnnnnnnnnnnnnnnnnnnnnnnnnnnnnnnnnnnnnnnnnnnnnnnnnnnnnnnnnnnnnnnnnnnnnnnnnnnnnnnnnnnnnnnnnnnnnnnnnnnnnnnnnnnnnnnnnnnnnnnnnnnnnnnnnnnnnnnnnnnnnnnnnnnnnnnnnnnnnnnnnnnnnnnnnnnnnnnnnnnnnnnnnnnnnnnnnnnnnnnnnnnnnnnnnnnnnnnnnnnnnnnnnnnnnnnnnnnnnnnnnnnnnnnnnnnnnnnnnnnnnnnnnnnnnnnnnnnnnnnnnnnnnnnnnnnnnnnnnnnnnnnnnnnnnnnnnnnnnnnnnnnnnnnnnnnnnnnnnnnnnnnnnnnnnnnnnnnnnnnnnnnnnnnnnnnnnnnnnnnnnnnnnnnnnnnnnnnnnnnnnnnnnnnnnnnnnnnnnnnnnnnnnnnnnnnnnnnnnnnnnnnnnnnnnnnnnnnnnnnnnnnnnnnnnnnnnnnnnnnnnnnnnnnnnnnnnnnnnnnnnnnnnnnnnnnnnnnnnnnnnnnnnnnnnnnnnnnnnnnnnnnnnnnnnnnnnnnnnnnnnnnnnnnnnnnnnnnnnnnnnnnnnnnnnnnnnnnnnnnnnnnnnnnnnnnnnnnnnnnnnnnnnnnnnnnnnnnnnnnnnnnnnnnnnnnnnnnnnnnnnnnnnnnnnnnnnnnnnnnnnnnnnnnnnnnnnnnnnnnnnnnnnnnnnnnnnnnnnnnnnnnnnnnnnnnnnnnnnnnnnnnnnnnnnnnnnnnnnnnnnnnnnnnnnnnnnnnnnnnnnnnnnnnnnnnnnnnnnnnnnnnnnnnnnnnnnnnnnnnnnnnnnnnnnnnnnnnnnnnnnnnnnnnnnnnnnnnnnnnnnnnnnnnnnnnnnnnnnnnnnnnnnnnnnnnnnnnnnnnnnnnnnnnnnnnnnnnnnnnnnnnnnnnnnnnnnnnnnnnnnnnnnnnnnnnnnnnnnnnnnnnnnnnnnnnnnnnnnnnnnnnnnnnnnnnnnnnnnnnnnnnnnnnnnnnnnnnnnnnnnnnnnnnnnnnnnnnnnnnnnnnnnnnnnnnnnnnnnnnnnnnnnnnnnnnnnnnnnnnnnnnnnnnnnnnnnnnnnnnnnnnnnnnnnnnnnnnnnnnnnnnnnnnnnnnnnnnnnnnnnnnnnnnnnnnnnnnnnnnnnnnnnnnnnnnnnnnnnnnnnnnnnnnnnnnnnnnnnnnnnnnnnnnnnnnnnnnnnnnnnnnnnnnnnnnnnnnnnnnnnnnnnnnnnnnnnnnnnnnnnnnnnnnnnnnnnnnnnnnnnnnnnnnnnnnnnnnnnnnnnnnnnnnnnnnnnnnnnnnnnnnnnnnnnnnnnnnnnnnnnnnnnnnnnnnnnnnnnnnnnnnnnnnnnnnnnnnnnnnnnnnnnnnnnnnnnnnnnnnnnnnnnnnnnnnnnnnnnnnnnnnnnnnnnnnnnnnnnnnnnnnnnnnnnnnnnnnnnnnnnnnnnnnnnnnnnnnnnnnnnnnnnnnnnnnnnnnnnnnnnnnnnnnnnnnnnnnnnnnnnnnnnnnnnnnnnnnnnnnnnnnnnnnnnnnnnnnnnnnnnnnnnnnnnnnnnnnnnnnnnnnnnnnnnnnnnnnnnnnnnnnnnnnnnnnnnnnnnnnnnnnnnnnnnnnnnnnnnnnnnnnnnnnnnnnnnnnnnnnnnnnnnnnnnnnnnnnnnnnnnnnnnnnnnnnnnnnnnnnnnnnnnnnnnnnnnnnnnnnnnnnnnnnnnnnnnnnnnnnnnnnnnnnnnnnnnnnnnnnnnnnnnnnnnnnnnnnnnnnnnnnnnnnnnnnnnnnnnnnnnnnnnnnnnnnnnnnnnnnnnnnnnnnnnnnnnnnnnnnnnnnnnnnnnnnnnnnnnnnnnnnnnnnnnnnnnnnnnnnnnnnnnnnnnnnnnnnnnnnnnnnnnnnnnnnnnnnnnnnnnnnnnnnnnnnnnnnnnnnnnnnnnnnnnnnnnnnnnnnnnnnnnnnnnnnnnnnnnnnnnnnnnnnnnnnnnnnnnnnnnnnnnnnnnnnnnnnnnnnnnnnnnnnnnnnnnnnnnnnnnnnnnnnnnnnnnnnnnnnnnnnnnnnnnnnnnnnnnnnnnnnnnnnnnnnnnnnnnnnnnnnnnnnnnnnnnnnnnnnnnnnnnnnnnnnnnnnnnnnnnnnnnnnnnnnnnnnnnnnnnnnnnnnnnnnnnnnnnnnnnnnnnnnnnnnnnnnnnnnnnnnnnnnnnnnnnnnnnnnnnnnnnnnnnnnnnnnnnnnnnnnnnnnnnnnnnnnnnnnnnnnnnnnnnnnnnnnnnnnnnnnnnnnnnnnnnnnnnnnnnnnnnnnnnnnnnnnnnnnnnnnnnnnnnnnnnnnnnnnnnnnnnnnnnnnnnnnnnnnnnnnnnnnnnnnnnnnnnnnnnnnnnnnnnnnnnnnnnnnnnnnnnnnnnnnnnnnnnnnnnnnnnnnnnnnnnnnnnnnnnnnnnnnnnnnnnnnnnnnnnnnnnnnnnnnnnnnnnnnnnnnnnnnnnnnnnnnnnnnnnnnnnnnnnnnnnnnnnnnnnnnnnnnnnnnnnnnnnnnnnnnnnnnnnnnnnnnnnnnnnnnnnnnnnnnnnnnnnnnnnnnnnnnnnnnnnnnnnnnnnnnnnnnnnnnnnnnnnnnnnnnnnnnnnnnnnnnnnnnnnnnnnnnnnnnnnnnnnnnnnnnnnnnnnnnnnnnnnnnnnnnnnnnnnnnnnnnnnnnnnnnnnnnnnnnnnnnnnnnnnnnnnnnnnnnnnnnnnnnnnnnnnnnnnnnnnnnnnnnnnnnnnnnnnnnnnnnnnnnnnnnnnnnnnnnnnnnnnnnnnnnnnnnnnnnnnnnnnnnnnnnnnnnnnnnnnnnnnnnnnnnnnnnnnnnnnnnnnnnnnnnnnnnnnnnnnnnnnnnnnnnnnnnnnnnnnnnnnnnnnnnnnnnnnnnnnnnnnnnnnnnnnnnnnnnnnnnnnnnnnnnnnnnnnnnnnnnnnnnnnnnnnnnnnnnnnnnnnnnnnnnnnnnnnnnnnnnnnnnnnnnnnnnnnnnnnnnnnnnnnnnnnnnnnnnnnnnnnnnnnnnnnnnnnnnnnnnnnnnnnnnnnnnnnnnnnnnnnnnnnnnnnnnnnnnnnnnnnnnnnnnnnnnnnnnnnnnnnnnnnnnnnnnnnnnnnnnnnnnnnnnnnnnnnnnnnnnnnnnnnnnnnnnnnnnnnnnnnnnnnnnnnnnnnnnnnnnnnnnnnnnnnnnnnnnnnnnnnnnnnnnnnnnnnnnnnnnnnnnnnnnnnnnnnnnnnnnnnnnnnnnnnnnnnnnnnnnnnnnnnnnnnnnnnnnnnnnnnnnnnnnnnnnnnnnnnnnnnnnnnnnnnnnnnnnnnnnnnnnnnnnnnnnnnnnnnnnnnnnnnnnnnnnnnnnnnnnnnnnnnnnnnnnnnnnnnnnnnnnnnnnnnnnnnnnnnnnnnnnnnnnnnnnnnnnnnnnnnnnnnnnnnnnnnnnnnnnnnnnnnnnnnnnnnnnnnnnnnnnnnnnnnnnnnnnnnnnnnnnnnnnnnnnnnnnnnnnnnnnnnnnnnnnnnnnnnnnnnnnnnnnnnnnnnnnnnnnnnnnnnnnnnnnnnnnnnnnnnnnnnnnnnnnnnnnnnnnnnnnnnnnnnnnnnnnnnnnnnnnnnnnnnnnnnnnnnnnnnnnnnnnnnnnnnnnnnnnnnnnnnnnnnnnnnnnnnnnnnnnnnnnnnnnnnnnnnnnnnnnnnnnnnnnnnnnnnnnnnnnnnnnnnnnnnnnnnnnnnnnnnnnnnnnnnnnnnnnnnnnnnnnnnnnnnnnnnnnnnnnnnnnnnnnnnnnnnnnnnnnnnnnnnnnnnnnnnnnnnnnnnnnnnnnnnnnnnnnnnnnnnnnnnnnnnnnnnnnnnnnnnnnnnnnnnnnnnnnnnnnnnnnnnnnnnnnnnnnnnnnnnnnnnnnnnnnnnnnnnnnnnnnnnnnnnnnnnnnnnnnnnnnnnnnnnnnnnnnnnnnnnnnnnnnnnnnnnnnnnnnnnnnnnnnnnnnnnnnnnnnnnnnnnnnnnnnnnnnnnnnnnnnnnnnnnnnnnnnnnnnnnnnnnnnnnnnnnnnnnnnnnnnnnnnnnnnnnnnnnnnnnnnnnnnnnnnnnnnnnnnnnnnnnnnnnnnnnnnnnnnnnnnnnnnnnnnnnnnnnnnnnnnnnnnnnnnnnnnnnnnnnnnnnnnnnnnnnnnnnnnnnnnnnnnnnnnnnnnnnnnnnnnnnnnnnnnnnnnnnnnnnnnnnnnnnnnnnnnnnnnnnnnnnnnnnnnnnnnnnnnnnnnnnnnnnnnnnnnnnnnnnnnnnnnnnnnnnnnnnnnnnnnnnnnnnnnnnnnnnnnnnnnnnnnnnnnnnnnnnnnnnnnnnnnnnnnnnnnnnnnnnnnnnnnnnnnnnnnnnnnnnnnnnnnnnnnnnnnnnnnnnnnnnnnnnnnnnnnnnnnnnnnnnnnnnnnnnnnnnnnnnnnnnnnnnnnnnnnnnnnnnnnnnnnnnnnnnnnnnnnnnnnnnnnnnnnnnnnnnnnnnnnnnnnnnnnnnnnnnnnnnnnnnnnnnnnnnnnnnnnnnnnnnnnnnnnnnnnnnnnnnnnnnnnnnnnnnnnnnnnnnnnnnnnnnnnnnnnnnnnnnnnnnnnnnnnnnnnnnnnnnnnnnnnnnnnnnnnnnnnnnnnnnnnnnnnnnnnnnnnnnnnnnnnnnnnnnnnnnnnnnnnnnnnnnnnnnnnnnnnnnnnnnnnnnnnnnnnnnnnnnnnnnnnnnnnnnnnnnnnnnnnnnnnnnnnnnnnnnnnnnnnnnnnnnnnnnnnnnnnnnnnnnnnnnnnnnnnnnnnnnnnnnnnnnnnnnnnnnnnnnnnnnnnnnnnnnnnnnnnnnnnnnnnnnnnnnnnnnnnnnnnnnnnnnnnnnnnnnnnnnnnnnnnnnnnnnnnnnnnnnnnnnnnnnnnnnnnnnnnnnnnnnnnnnnnnnnnnnnnnnnnnnnnnnnnnnnnnnnnnnnnnnnnnnnnnnnnnnnnnnnnnnnnnnnnnnnnnnnnnnnnnnnnnnnnnnnnnnnnnnnnnnnnnnnnnnnnnnnnnnnnnnnnnnnnnnnnnnnnnnnnnnnnnnnnnnnnnnnnnnnnnnnnnnnnnnnnnnnnnnnnnnnnnnnnnnnnnnnnnnnnnnnnnnnnnnnnnnnnnnnnnnnnnnnnnnnnnnnnnnnnnnnnnnnnnnnnnnnnnnnnnnnnnnnnnnnnnnnnnnnnnnnnnnnnnnnnnnnnnnnnnnnnnnnnnnnnnnnnnnnnnnnnnnnnnnnnnnnnnnnnnnnnnnnnnnnnnnnnnnnnnnnnnnnnnnnnnnnnnnnnnnnnnnnnnnnnnnnnnnnnnnnnnnnnnnnnnnnnnnnnnnnnnnnnnnnnnnnnnnnnnnnnnnnnnnnnnnnnnnnnnnnnnnnnnnnnnnnnnnnnnnnnnnnnnnnnnnnnnnnnnnnnnnnnnnnnnnnnnnnnnnnnnnnnnnnnnnnnnnnnnnnnnnnnnnnnnnnnnnnnnnnnnnnnnnnnnnnnnnnnnnnnnnnnnnnnnnnnnnnnnnnnnnnnnnnnnnnnnnnnnnnnnnnnnnnnnnnnnnnnnnnnnnnnnnnnnnnnnnnnnnnnnnnnnnnnnnnnnnnnnnnnnnnnnnnnnnnnnnnnnnnnnnnnnnnnnnnnnnnnnnnnnnnnnnnnnnnnnnnnnnnnnnnnnnnnnnnnnnnnnnnnnnnnnnnnnnnnnnnnnnnnnnnnnnnnnnnnnnnnnnnnnnnnnnnnnnnnnnnnnnnnnnnnnnnnnnnnnnnnnnnnnnnnnnnnnnnnnnnnnnnnnnnnnnnnnnnnnnnnnnnnnnnnnnnnnnnnnnnnnnnnnnnnnnnnnnnnnnnnnnnnnnnnnnnnnnnnnnnnnnnnnnnnnnnnnnnnnnnnnnnnnnnnnnnnnnnnnnnnnnnnnnnnnnnnnnnnnnnnnnnnnnnnnnnnnnnnnnnnnnnnnnnnnnnnnnnnnnnnnnnnnnnnnnnnnnnnnnnnnnnnnnnnnnnnnnnnnnnnnnnnnnnnnnnnnnnnnnnnnnnnnnnnnnnnnnnnnnnnnnnnnnnnnnnnnnnnnnnnnnnnnnnnnnnnnnnnnnnnnnnnnnnnnnnnnnnnnnnnnnnnnnnnnnnnnnnnnnnnnnnnnnnnnnnnnnnnnnnnnnnnnnnnnnnnnnnnnnnnnnnnnnnnnnnnnnnnnnnnnnnnnnnnnnnnnnnnnnnnnnnnnnnnnnnnnnnnnnnnnnnnnnnnnnnnnnnnnnnnnnnnnnnnnnnnnnnnnnnnnnnnnnnnnnnnnnnnnnnnnnnnnnnnnnnnnnnnnnnnnnnnnnnnnnnnnnnnnnnnnnnnnnnnnnnnnnnnnnnnnnnnnnnnnnnnnnnnnnnnnnnnnnnnnnnnnnnnnnnnnnnnnnnnnnnnnnnnnnnnnnnnnnnnnnnnnnnnnnnnnnnnnnnnnnnnnnnnnnnnnnnnnnnnnnnnnnnnnnnnnnnnnnnnnnnnnnnnnnnnnnnnnnnnnnnnnnnnnnnnnnnnnnnnnnnnnnnnnnnnnnnnnnnnnnnnnnnnnnnnnnnnnnnnnnnnnnnnnnnnnnnnnnnnnnnnnnnnnnnnnnnnnnnnnnnnnnnnnnnnnnnnnnnnnnnnnnnnnnnnnnnnnnnnnnnnnnnnnnnnnnnnnnnnnnnnnnnnnnnnnnnnnnnnnnnnnnnnnnnnnnnnnnnnnnnnnnnnnnnnnnnnnnnnnnnnnnnnnnnnnnnnnnnnnnnnnnnnnnnnnnnnnnnnnnnnnnnnnnnnnnnnnnnnnnnnnnnnnnnnnnnnnnnnnnnnnnnnnnnnnnnnnnnnnnnnnnnnnnnnnnnnnnnnnnnnnnnnnnnnnnnnnnnnnnnnnnnnnnnnnnnnnnnnnnnnnnnnnnnnnnnnnnnnnnnnnnnnnnnnnnnnnnnnnnnnnnnnnnnnnnnnnnnnnnnnnnnnnnnnnnnnnnnnnnnnnnnnnnnnnnnnnnnnnnnnnnnnnnnnnnnnnnnnnnnnnnnnnnnnnnnnnnnnnnnnnnnnnnnnnnnnnnnnnnnnnnnnnnnnnnnnnnnnnnnnnnnnnnnnnnnnnnnnnnnnnnnnnnnnnnnnnnnnnnnnnnnnnnnnnnnnnnnnnnnnnnnnnnnnnnnnnnnnnnnnnnnnnnnnnnnnnnnnnnnnnnnnnnnnnnnnnnnnnnnnnnnnnnnnnnnnnnnnnnnnnnnnnnnnnnnnnnnnnnnnnnnnnnnnnnnnnnnnnnnnnnnnnnnnnnnnnnnnnnnnnnnnnnnnnnnnnnnnnnnnnnnnnnnnnnnnnnnnnnnnnnnnnnnnnnnnnnnnnnnnnnnnnnnnnnnnnnnnnnnnnnnnnnnnnnnnnnnnnnnnnnnnnnnnnnnnnnnnnnnnnnnnnnnnnnnnnnnnnnnnnnnnnnnnnnnnnnnnnnnnnnnnnnnnnnnnnnnnnnnnnnnnnnnnnnnnnnnnnnnnnnnnnnnnnnnnnnnnnnnnnnnnnnnnnnnnnnnnnnnnnnnnnnnnnnnnnnnnnnnnnnnnnnnnnnnnnnnnnnnnnnnnnnnnnnnnnnnnnnnnnnnnnnnnnnnnnnnnnnnnnnnnnnnnnnnnnnnnnnnnnnnnnnnnnnnnnnnnnnnnnnnnnnnnnnnnnnnnnnnnnnnnnnnnnnnnnnnnnnnnnnnnnnnnnnnnnnnnnnnnnnnnnnnnnnnnnnnnnnnnnnnnnnnnnnnnnnnnnnnnnnnnnnnnnnnnnnnnnnnnnnnnnnnnnnnnnnnnnnnnnnnnnnnnnnnnnnnnnnnnnnnnnnnnnnnnnnnnnnnnnnnnnnnnnnnnnnnnnnnnnnnnnnnnnnnnnnnnnnnnnnnnnnnnnnnnnnnnnnnnnnnnnnnnnnnnnnnnnnnnnnnnnnnnnnnnnnnnnnnnnnnnnnnnnnnnnnnnnnnnnnnnnnnnnnnnnnnnnnnnnnnnnnnnnnnnnnnnnnnnnnnnnnnnnnnnnnnnnnnnnnnnnnnnnnnnnnnnnnnnnnnnnnnnnnnnnnnnnnnnnnnnnnnnnnnnnnnnnnnnnnnnnnnnnnnnnnnnnnnnnnnnnnnnnnnnnnnnnnnnnnnnnnnnnnnnnnnnnnnnnnnnnnnnnnnnnnnnnnnnnnnnnnnnnnnnnnnnnnnnnnnnnnnnnnnnnnnnnnnnnnnnnnnnnnnnnnnnnnnnnnnnnnnnnnnnnnnnnnnnnnnnnnnnnnnnnnnnnnnnnnnnnnnnnnnnnnnnnnnnnnnnnnnnnnnnnnnnnnnnnnnnnnnnnnnnnnnnnnnnnnnnnnnnnnnnnnnnnnnnnnnnnnnnnnnnnnnnnnnnnnnnnnnnnnnnnnnnnnnnnnnnnnnnnnnnnnnnnnnnnnnnnnnnnnnnnnnnnnnnnnnnnnnnnnnnnnnnnnnnnnnnnnnnnnnnnnnnnnnnnnnnnnnnnnnnnnnnnnnnnnnnnnnnnnnnnnnnnnnnnnnnnnnnnnnnnnnnnnnnnnnnnnnnnnnnnnnnnnnnnnnnnnnnnnnnnnnnnnnnnnnnnnnnnnnnnnnnnnnnnnnnnnnnnnnnnnnnnnnnnnnnnnnnnnnnnnnnnnnnnnnnnnnnnnnnnnnnnnnnnnnnnnnnnnnnnnnnnnnnnnnnnnnnnnnnnnnnnnnnnnnnnnnnnnnnnnnnnnnnnnnnnnnnnnnnnnnnnnnnnnnnnnnnnnnnnnnnnnnnnnnnnnnnnnnnnnnnnnnnnnnnnnnnnnnnnnnnnnnnnnnnnnnnnnnnnnnnnnnnnnnnnnnnnnnnnnnnnnnnnnnnnnnnnnnnnnnnnnnnnnnnnnnnnnnnnnnnnnnnnnnnnnnnnnnnnnnnnnnnnnnnnnnnnnnnnnnnnnnnnnnnnnnnnnnnnnnnnnnnnnnnnnnnnnnnnnnnnnnnnnnnnnnnnnnnnnnnnnnnnnnnnnnnnnnnnnnnnnnnnnnnnnnnnnnnnnnnnnnnnnnnnnnnnnnnnnnnnnnnnnnnnnnnnnnnnnnnnnnnnnnnnnnnnnnnnnnnnnnnnnnnnnnnnnnnnnnnnnnnnnnnnnnnnnnnnnnnnnnnnnnnnnnnnnnnnnnnnnnnnnnnnnnnnnnnnnnnnnnnnnnnnnnnnnnnnnnnnnnnnnnnnnnnnnnnnnnnnnnnnnnnnnnnnnnnnnnnnnnnnnnnnnnnnnnnnnnnnnnnnnnnnnnnnnnnnnnnnnnnnnnnnnnnnnnnnnnnnnnnnnnnnnnnnnnnnnnnnnnnnnnnnnnnnnnnnnnnnnnnnnnnnnnnnnnnnnnnnnnnnnnnnnnnnnnnnnnnnnnnnnnnnnnnnnnnnnnnnnnnnnnnnnnnnnnnnnnnnnnnnnnnnnnnnnnnnnnnnnnnnnnnnnnnnnnnnnnnnnnnnnnnnnnnnnnnnnnnnnnnnnnnnnnnnnnnnnnnnnnnnnnnnnnnnnnnnnnnnnnnnnnnnnnnnnnnnnnnnnnnnnnnnnnnnnnnnnnnnnnnnnnnnnnnnnnnnnnnnnnnnnnnnnnnnnnnnnnnnnnnnnnnnnnnnnnnnnnnnnnnnnnnnnnnnnnnnnnnnnnnnnnnnnnnnnnnnnnnnnnnnnnnnnnnnnnnnnnnnnnnnnnnnnnnnnnnnnnnnnnnnnnnnnnnnnnnnnnnnnnnnnnnnnnnnnnnnnnnnnnnnnnnnnnnnnnnnnnnnnnnnnnnnnnnnnnnnnnnnnnnnnnnnnnnnnnnnnnnnnnnnnnnnnnnnnnnnnnnnnnnnnnnnnnnnnnnnnnnnnnnnnnnnnnnnnnnnnnnnnnnnnnnnnnnnnnnnnnnnnnnnnnnnnnnnnnnnnnnnnnnnnnnnnnnnnnnnnnnnnnnnnnnnnnnnnnnnnnnnnnnnnnnnnnnnnnnnnnnnnnnnnnnnnnnnnnnnnnnnnnnnnnnnnnnnnnnnnnnnnnnnnnnnnnnnnnnnnnnnnnnnnnnnnnnnnnnnnnnnnnnnnnnnnnnnnnnnnnnnnnnnnnnnnnnnnnnnnnnnnnnnnnnnnnnnnnnnnnnnnnnnnnnnnnnnnnnnnnnnnnnnnnnnnnnnnnnnnnnnnnnnnnnnnnnnnnnnnnnnnnnnnnnnnnnnnnnnnnnnnnnnnnnnnnnnnnnnnnnnnnnnnnnnnnnnnnnnnnnnnnnnnnnnnnnnnnnnnnnnnnnnnnnnnnnnnnnnnnnnnnnnnnnnnnnnnnnnnnnnnnnnnnnnnnnnnnnnnnnnnnnnnnnnnnnnnnnnnnnnnnnnnnnnnnnnnnnnnnnnnnnnnnnnnnnnnnnnnnnnnnnnnnnnnnnnnnnnnnnnnnnnnnnnnnnnnnnnnnnnnnnnnnnnnnnnnnnnnnnnnnnnnnnnnnnnnnnnnnnnnnnnnnnnnnnnnnnnnnnnnnnnnnnnnnnnnnnnnnnnnnnnnnnnnnnnnnnnnnnnnnnnnnnnnnnnnnnnnnnnnnnnnnnnnnnnnnnnnnnnnnnnnnnnnnnnnnnnnnnnnnnnnnnnnnnnnnnnnnnnnnnnnnnnnnnnnnnnnnnnnnnnnnnnnnnnnnnnnnnnnnnnnnnnnnnnnnnnnnnnnnnnnnnnnnnnnnnnnnnnnnnnnnnnnnnnnnnnnnnnnnnnnnnnnnnnnnnnnnnnnnnnnnnnnnnnnnnnnnnnnnnnnnnnnnnnnnnnnnnnnnnnnnnnnnnnnnnnnnnnnnnnnnnnnnnnnnnnnnnnnnnnnnnnnnnnnnnnnnnnnnnnnnnnnnnnnnnnnnnnnnnnnnnnnnnnnnnnnnnnnnnnnnnnnnnnnnnnnnnnnnnnnnnnnnnnnnnnnnnnnnnnnnnnnnnnnnnnnnnnnnnnnnnnnnnnnnnnnnnnnnnnnnnnnnnnnnnnnnnnnnnnnnnnnnnnnnnnnnnnnnnnnnnnnnnnnnnnnnnnnnnnnnnnnnnnnnnnnnnnnnnnnnnnnnnnnnnnnnnnnnnnnnnnnnnnnnnnnnnnnnnnnnnnnnnnnnnnnnnnnnnnnnnnnnnnnnnnnnnnnnnnnnnnnnnnnnnnnnnnnnnnnnnnnnnnnnnnnnnnnnnnnnnnnnnnnnnnnnnnnnnnnnnnnnnnnnnnnnnnnnnnnnnnnnnnnnnnnnnnnnnnnnnnnnnnnnnnnnnnnnnnnnnnnnnnnnnnnnnnnnnnnnnnnnnnnnnnnnnnnnnnnnnnnnnnnnnnnnnnnnnnnnnnnnnnnnnnnnnnnnnnnnnnnnnnnnnnnnnnnnnnnnnnnnnnnnnnnnnnnnnnnnnnnnnnnnnnnnnnnnnnnnnnnnnnnnnnnnnnnnnnnnnnnnnnnnnnnnnnnnnnnnnnnnnnnnnnnnnnnnnnnnnnnnnnnnnnnnnnnnnnnnnnnnnnnnnnnnnnnnnnnnnnnnnnnnnnnnnnnnnnnnnnnnnnnnnnnnnnnnnnnnnnnnnnnnnnnnnnnnnnnnnnnnnnnnnnnnnnnnnnnnnnnnnnnnnnnnnnnnnnnnnnnnnnnnnnnnnnnnnnnnnnnnnnnnnnnnnnnnnnnnnnnnnnnnnnnnnnnnnnnnnnnnnnnnnnnnnnnnnnnnnnnnnnnnnnnnnnnnnnnnnnnnnnnnnnnnnnnnnnnnnnnnnnnnnnnnnnnnnnnnnnnnnnnnnnnnnnnnnnnnnnnnnnnnnnnnnnnnnnnnnnnnnnnnnnnnnnnnnnnnnnnnnnnnnnnnnnnnnnnnnnnnnnnnnnnnnnnnnnnnnnnnnnnnnnnnnnnnnnnnnnnnnnnnnnnnnnnnnnnnnnnnnnnnnnnnnnnnnnnnnnnnnnnnnnnnnnnnnnnnnnnnnnnnnnnnnnnnnnnnnnnnnnnnnnnnnnnnnnnnnnnnnnnnnnnnnnnnnnnnnnnnnnnnnnnnnnnnnnnnnnnnnnnnnnnnnnnnnnnnnnnnnnnnnnnnnnnnnnnnnnnnnnnnnnnnnnnnnnnnnnnnnnnnnnnnnnnnnnnnnnnnnnnnnnnnnnnnnnnnnnnnnnnnnnnnnnnnnnnnnnnnnnnnnnnnnnnnnnnnnnnnnnnnnnnnnnnnnnnnnnnnnnnnnnnnnnnnnnnnnnnnnnnnnnnnnnnnnnnnnnnnnnnnnnnnnnnnnnnnnnnnnnnnnnnnnnnnnnnnnnnnnnnnnnnnnnnnnnnnnnnnnnnnnnnnnnnnnnnnnnnnnnnnnnnnnnnnnnnnnnnnnnnnnnnnnnnnnnnnnnnnnnnnnnnnnnnnnnnnnnnnnnnnnnnnnnnnnnnnnnnnnnnnnnnnnnnnnnnnnnnnnnnnnnnnnnnnnnnnnnnnnnnnnnnnnnnnnnnnnnnnnnnnnnnnnnnnnnnnnnnnnnnnnnnnnnnnnnnnnnnnnnnnnnnnnnnnnnnnnnnnnnnnnnnnnnnnnnnnnnnnacaatgttgtggtgtgctaggcgnnnnnnnnnnnnnnnnnnnnnnnnnnnnnnnnnnnnnnnnnnnnnnnnnnnnnnnnngggctggactattttgttaccggtaacagaatatacccctcgcccctataagggcccggtccattttgcaaaacccggtgttgcacccccacccgaaacacagagaaagcccaccccatttcccagcatcttctcgaaccaccccttcccgacggctnnnnnnnnnnnnnnnnnnnnnnnnnnnnnnnnnnnnnnnnnnnnnnnnnnnnnnnnnnnnnnnnnnnnnnnnnnnnnnnnnnnnnnnnnnnnnnnnnnnnnnnnnnnnnnnnnnnnnnnnnnnnngcgcaccgccgccttccttcccatgcgacgggtgcctccctccccacgcgctagcactttcctccccgcgctccgccgtcttcctccacgagatccggccgccttcccccttccctaaggtcccacggctgcaccgccgccgcccaaccccttcgtcttcaagccaggggtctgggccgtcctcctcgccgcggtggccctactacccagcggcagcggaagcggggtggtgggtgccggcgggctactctccggagagggtgctgttctgcacgagcgctgccagacatatcaagttctctggtatattttctatatgaccattctacatcagttcttcagtgcccacaaaaaaagaccattagctcaactctcatttactaaactgattttttagtttagttcaattaacgaatttagttcggttcaaattcttgtaatagtttgagttcaaattcttgttactcagtgcccatccatgctgatccttctacatgtagacaacgaattgcaagacttgcgcacaatcctatactcagtagggcagctacctgatggcaggaccacaaccttatacgtcgctcgaggttcacctgcaattctagatcacgcaggctccttctctctgcctaacgggctctctctctttaatgtgtgtgtatgtggtacagcaatagatagccgcttgctttttatgaattgctcgggcaggagcaaaagctccacagtgtggtgcaaaaattctgaaattactagatcatgtgagtattttgggttatgggtagtggatgtctgacttcatgcatcatctgctcctttcttttcggctatgatttaggcaacgcaacaaacaagcccatcagtcagccaccataaacagtgaacaccaccgtacactaggcattagattagagatcgctttctttaattatgatggtaccatcccattgttctgtattgatgatgatgataatacactttctcgaccaacatacattttcatactttttagtttgcacgttcaccccgggttgagcagacgagacgggccttgttccgagtgcaggaggccgcactgcctacactccagaaagtacaaatatacttggataaaaagttcaatattcattgtccagatagtgcctagaaaaagtgaagataggtttgtagtgatgtttatgatagactggtagttgaaagatttagaggtaaaaatattttctagcaagttgttgaatgtttcaattcgtttcgtgtgaattttgttatagcaaaaaactgaatggtaggcaagatgactatagttatggcaaaaacaatttttttttaaagtttctttttaaatctcgggttaatacatgaacatggtcgtctttttacatgcacttacatcaactcatcaattcctcatacctctgctcccggccctcgatcctattgcattacaggaagtgagcgagtttgagagatatttgagggatgaatgtgtatgtgcggttgctgctgctatgtattctggttttgcatttacaggaagtgagaagaaattcagaaagatgaatgtgcatgctgctgcactactatgtttgttgtttttatgaagatgattgctatcaaaattttgttgcttaaaatgctgctatttgctgattgatgcatatctacataaaaactgtgaaaaagttcggagagaacctcctagatcgttcgaacgccagaccctgttaagttccccttgacaaaatcttatcttgttcctgttttttgcaggttgcagcaaaaccaagttgccaaagtcaaaatccccaaaaagcctattctttgcatctttcagtactcactcaggtgaggtctcaatttcttctaaatctgaagttcaacttctctgaaaatttggcaacagttcaatgaaaaggtttacttccatacaaaagtatgggtacccaaccaatttcgaaacaatgtttctactttctgcatgtccttgttggaatgagagggatgactagaatgctcagagaaacttctttacttgacccagaggcggtatacttttatttgaagcttttcatttgtaaattctgcatctttttttgtatacagactataagcactatattggtacttggactagaatacaagtattacttccaggcaagttcaaaatgaaacccgcagcatgttnnnnnnnnnnnnnnnnnnnnnnnnnnnnnnnnnnnnnnnnnnnnnnnnnnnnnnnnnnnnnnnnnnnnnnnnnnnnnnnnnnnnnnnnnnnnnnnnnnnnnnnnnnnnnnnnnnnnnnnnnnnnnnnnnnnnnnnnnnnnnnnnnnnnnnnnnnnnnnnnnnnnnnnnnnnnnnnnnnnnnnnnnnnnnnnnnnnnnnnnnnnnnnnnnnnnnnnnnnnnnnnnnnnnnnnnnnnnnnnnnnnnnnnnnnnnnnnnnnnnnnnnnnnnnnnnnnnnnnnnnnnnnnnnnnnnnnnnnnnnnnnnnnnnnnnnnnnnnnnnnnnnnnnnnnnnnnnnnnnnnnnnnnnnnnnnnnnnnnnnnnnnnnnnnnnnnnnnnnnnnnnnnnnnnnnnnnnnnnnnnnnnnnnnnnnnnnnnnnnnnnnnnnnnnnnnnnnnnnnnnnnnnnnnnnnnnnnnnnnnnnnnnnnnnnnnnnnnnnnnnnnnnnnnnnnnnnnnnnnnnnnnnnnnnnnnnnnnnnnnnnnnnnnnnnnnnnnnnnnnnnnnnnnnnnnnnnnnnnnnnnnnnnnnnnnnnnnnnnnnnnnnnnnnnnnnnnnnnnnnnnnnnnnnnnnnnnnnnnnnnnnnnnnnnnnnnnnnnnnnnnnnnnnnnnnnnnnnnnnnnnnnnnnnnnnnnnnnnnnnnnnnnnnnnnnnnnnnnnnnnnnnnnnnnnnnnnnnnnnnnnnnnnnnnnnnnnnnnnnnnnnnnnnnnnnnnnnnnnnnnnnnnnnnnnnnnnnnnnnnnnnnnnnnnnnnnnnnnnnnnnnnnnnnnnnnnnnnnnnnnnnnnnnnnnnnnnnnnnnnnnnnnnnnnnnnnnnnnnnnnnnnnnnnnnnnnnnnnnnnnnnnnnnnnnnnnnnnnnnnnnnnnnnnnnnnnnnnnnnnnnnnnnnnnnnnnnnnnnnnnnnnnnnnnnnnnnnnnnnnnnnnnnnnnnnnnnnnnnnnnnnnnnnnnnnnnnnnnnnnnnnnnnnnnnnnnnnnnnnnnnnnnnnnnnnnnnnnnnnnnnnnnnnnnnnnnnnnnnnnnnnnnnnnnnnnnnnnnnnnnnnnnnnnnnnnnnnnnnnnnnnnnnnnnnnnnnnnnnnnnnnnnnnnnnnnnnnnnnnnnnnnnnnnnnnnnnnnnnnnnnnnnnnnnnnnnnnnnnnnnnnnnnnnnnnnnnnnnnnnnnnnnnnnnnnnnnnnnnnnnnnnnnnnnnnnnnnnnnnnnnnnnnnnnnnnnnnnnnnnnnnnnnnnnnnnnnnnnnnnnnnnnnnnnnnnnnnnnnnnnnnnnnnnnnnnnnnnnnnnnnnnnnnnnnnnnnnnnnnnnnnnnnnnnnnnnnnnnnnnnnnnnnnnnnnnnnnnnnnnnnnnnnnnnnnnnnnnnnnnnnnnnnnnnnnnnnnnnnnnnnnnnnnnnnnnnnnnnnnnnnnnnnnnnnnnnnnnnnnnnnnnnnnnnnnnnnnnnnnnnnnnnnnnnnnnnnnnnnnnnnnnnnnnnnnnnnnnnnnnnnnnnnnnnnnnnnnnnnnnnnnnnnnnnnnnnnnnnnnnnnnnnnnnnnnnnnnnnnnnnnnnnnnnnnnnnnnnnnnnnnnnnnnnnnnnnnnnnnnnnnnnnnnnnnnnnnnnnnnnnnnnnnnnnnnnnnnnnnnnnnnnnnnnnnnnnnnnnnnnnnnnnnnnnnnnnnnnnnnnnnnnnnnnnnnnnnnnnnnnnnnnnnnnnnnnnnnnnnnnnnnnnnnnnnnnnnnnnnnnnnnnnnnnnnnnnnnnnnnnnnnnnnnnnnnnnnnnnnnnnnnnnnnnnnnnnnnnnnnnnnnnnnnnnnnnnnnnnnnnnnnnnnnnnnnnnnnnnnnnnnnnnnnnnnnnnnnnnnnnnnnnnnnnnnnnnnnnnnnnnnnnnnnnnnnnnnnnnnnnnnnnnnnnnnnnnnnnnnnnnnnnnnnnnnnnnnnnnnnnnnnnnnnnnnnnnnnnnnnnnnnnnnnnnnnnnnnnnnnnnnnnnnnnnnnnnnnnnnnnnnnnnnnnnnnnnnnnnnnnnnnnnnnnnnnnnnnnnnnnnnnnnnnnnnnnnnnnnnnnnnnnnnnnnnnnnnnnnnnnnnnnnnnnnnnnnnnnnnnnnnnnnnnnnnnnnnnnnnnnnnnnnnnnnnnnnnnnnnnnnnnnnnnnnnnnnnnnnnnnnnnnnnnnnnnnnnnnnnnnnnnnnnnnnnnnnnnnnnnnnnnnnnnnnnnnnnnnnnnnnnnnnnnnnnnnnnnnnnnnnnnnnnnnnnnnnnnnnnnnnnnnnnnnnnnnnnnnnnnnnnnnnnnnnnnnnnnnnnnnnnnnnnnnnnnnnnnnnnnnnnnnnnnnnnnnnnnnnnnnnnnnnnnnnnnnnnnnnnnnnnnnnnnnnnnnnnnnnnnnnnnnnnnnnnnnnnnnnnnnnnnnnnnnnnnnnnnnnnnnnnnnnnnnnnnnnnnnnnnnnnnnnnnnnnnnnnnnnnnnnnnnnnnnnnnnnnnnnnnnnnnnnnnnnnnnnnnnnnnnnnnnnnnnnnnnnnnnnnnnnnnnnnnnnnnnnnnnnnnnnnnnnnnnnnnnnnnnnnnnnnnnnnnnnnnnnnnnnnnnnnnnnnnnnnnnnnnnnnnnnnnnnnnnnnnnnnnnnnnnnnnnnnnnnnnnnnnnnnnnnnnnnnnnnnnnnnnnnnnnnnnnnnnnnnnnnnnnnnnnnnnnnnnnnnnnnnnnnnnnnnnnnnnnnnnnnnnnnnnnnnnnnnnnnnnnnnnnnnnnnnnnnnnnnnnnnnnnnnnnnnnnnnnnnnnnnnnnnnnnnnnnnnnnnnnnnnnnnnnnnnnnnnnnnnnnnnnnnnnnnnnnnnnnnnnnnnnnnnnnnnnnnnnnnnnnnnnnnnnnnnnnnnnnnnnnnnnnnnnnnnnnnnnnnnnnnnnnnnnnnnnnnnnnnnnnnnnnnnnnnnnnnnnnnnnnnnnnnnnnnnnnnnnnnnnnnnnnnnnnnnnnnnnnnnnnnnnnnnnnnnnnnnnnnnnnnnnnnnnnnnnnnnnnnnnnnnnnnnnnnnnnnnnnnnnnnnnnnnnnnnnnnnnnnnnnnnnnnnnnnnnnnnnnnnnnnnnnnnnnnnnnnnnnnnnnnnnnnnnnnnnnnnnnnnnnnnnnnnnnnnnnnnnnnnnnnnnnnnnnnnnnnnnnnnnnnnnnnnnnnnnnnnnnnnnnnnnnnnnnnnnnnnnnnnnnnnnnnnnnnnnnnnnnnnnnnnnnnnnnnnnnnnnnnnnnnnnnnnnnnnnnnnnnnnnnnnnnnnnnnnnnnnnnnnnnnnnnnnnnnnnnnnnnnnnnnnnnnnnnnnnnnnnnnnnnnnnnnnnnnnnnnnnnnnnnnnnnnnnnnnnnnnnnnnnnnnnnnnnnnnnnnnnnnnnnnnnnnnnnnnnnnnnnnnnnnnnnnnnnnnnnnnnnnnnnnnnnnnnnnnnnnnnnnnnnnnnnnnnnnnnnnnnnnnnnnnnnnnnnnnnnnnnnnnnnnnnnnnnnnnnnnnnnnnnnnnnnnnnnnnnnnnnnnnnnnnnnnnnnnnnnnnnnnnnnnnnnnnnnnnnnnnnnnnnnnnnnnnnnnnnnnnnnnnnnnnnnnnnnnnnnnnnnnnnnnnnnnnnnnnnnnnnnnnnnnnnnnnnnnnnnnnnnnnnnnnnnnnnnnnnnnnnnnnnnnnnnnnnnnnnnnnnnnnnnnnnnnnnnnnnnnnnnnnnnnnnnnnnnnnnnnnnnnnnnnnnnnnnnnnnnnnnnnnnnnnnnnnnnnnnnnnnnnnnnnnnnnnnnnnnnnnnnnnnnnnnnnnnnnnnnnnnnnnnnnnnnnnnnnnnnnnnnnnnnnnnnnnnnnnnnnnnnnnnnnnnnnnnnnnnnnnnnnnnnnnnnnnnnnnnnnnnnnnnnnnnnnnnnnnnnnnnnnnnnnnnnnnnnnnnnnnnnnnnnnnnnnnnnnnnnnnnnnnnnnnnnnnnnnnnnnnnnnnnnnnnnnnnnnnnnnnnnnnnnnnnnnnnnnnnnnnnnnnnnnnnnnnnnnnnnnnnnnnnnnnnnnnnnnnnnnnnnnnnnnnnnnnnnnnnnnnnnnnnnnnnnnnnnnnnnnnnnnnnnnnnnnnnnnnnnnnnnnnnnnnnnnnnnnnnnnnnnnnnnnnnnnnnnnnnnnnnnnnnnnnnnnnnnnnnnnnnnnnnnnnnnnnnnnnnnnnnnnnnnnnnnnnnnnnnnnnnnnnnnnnnnnnnnnnnnnnnnnnnnnnnnnnnnnnnnnnnnnnnnnnnnnnnnnnnnnnnnnnnnnnnnnnnnnnnnnnnnnnnnnnnnnnnnnnnnnnnnnnnnnnnnnnnnnnnnnnnnnnnnnnnnnnnnnnnnnnnnnnnnnnnnnnnnnnnnnnnnnnnnnnnnnnnnnnnnnnnnnnnnnnnnnnnnnnnnnnnnnnnnnnnnnnnnnnnnnnnnnnnnnnnnnnnnnnnnnnnnnnnnnnnnnnnnnnnnnnnnnnnnnnnnnnnnnnnnnnnnnnnnnnnnnnnnnnnnnnnnnnnnnnnnnnnnnnnnnnnnnnnnnnnnnnnnnnnnnnnnnnnnnnnnnnnnnnnnnnnnnnnnnnnnnnnnnnnnnnnnnnnnnnnnnnnnnnnnnnnnnnnnnnnnnnnnnnnnnnnnnnnnnnnnnnnnnnnnnnnnnnnnnnnnnnnnnnnnnnnnnnnnnnnnnnnnnnnnnnnnnnnnnnnnnnnnnnnnnnnnnnnnnnnnnnnnnnnnnnnnnnnnnnnnnnnnnnnnnnnnnnnnnnnnnnnnnnnnnnnnnnnnnnnnnnnnnnnnnnnnnnnnnnnnnnnnnnnnnnnnnnnnnnnnnnnnnnnnnnnnnnnnnnnnnnnnnnnnnnnnnnnnnnnnnnnnnnnnnnnnnnnnnnnnnnnnnnnnnnnnnnnnnnnnnnnnnnnnnnnnnnnnnnnnnnnnnnnnnnnnatgttctttgttcattttagcaaataggtgagagagagcactagattgcctaaaacatgtttgatgctttgtccatgagacttcagcgctttaaaaaaagacaggatgtgcgcacctgttcgtatagcaacaaagagaaaaaaggctagtgctcctagtgatgcccattagaatatgaagtgtatgtgcatctactaatcttcccatctaatgttttattaattttaatattgcttctctttctcatggctttattttgaaaatatactaggttcttgtgaactagtgaagttcaaaaaaatgataagaaagttaagatgcaaaaatttacacattacattatataatgaaaatagaaagtaatattgtaaatttcactagttcaaaagataaaaaaagtgaagtgtggacgtttgctgtgcaaaccaaatgtagttcttccctgcaacctacatcagttcatggttttggaaaaacaccaggaacttttacatctgcatagcatcctttgtcaatgttcatttgtttcttgttgtttatgttttatgtataaccatggttccttgccgtccccgctgacataaaaaatattgacctttagcaagcactgttgctcaattttctaggtttagttcagtccaatctctagtttttgttcagtacaatttttagatagcatagtgtgtgctaaaaaatatcattagttcatgtttcaaaattagatatatcacctaaaataagtttcaaaagaaaaattgtgtaagttcaatctgtgtgctgctacagttttgcacttcttgtcgagtcatactagtactgatgaataacgagttacacatataactattactgattgaaaaatgtaggggttgaagtaaaccctctcgatataactattcgaatcagttcaactttatatttggttttcagttcatcttgtgtgttacagatcagtttcatgtacctgtttacttgtgtgttgtatttttgaattcgaagttcaacaaaaaatgatacaagttcaaaaagaaaacatcatggagttcatgttttaaaattttgggaccatggatgaagctcttggcgcattgttggacaacgatgcttcaaactttgtcaaggaacagctatgatgcaccaaccgtctgatttcttttctcctaaactctgatctgcctcatgctgacaggtatgagcacaaaccagtctctctctctctctgggcatttctgcaagattatctgcttacacttttagtacaaatgcccttgacaaatgtagttcagttcttgcacccatgatcaaaacctgcaagttcagtacactgttagacaagattatcttcctaaacctctggtttagtacacttgacaaatgtagtttagtacactttagaaaagattattttcctaaacatgcaagttcaagattggcattacattcagttcttgtagtacaaatgtctcagtattcagcgacatctgaaaattgatgtagactgctcttgcatctccaatcgaatgtttctcagcttcctcccaatccgctcaatcttgtcttgctccgaagcatgcttcagttcaacaataagctctagaaaagttcagagttcagagtactttgcgccacaggttgtctctttttcttcgtcagttttgggacgatgggtcaatgtagcatatttaaaaatgtccagtaaatgatcaatttttttgccagatctactcattgcaagttaggtactggcaatgacaacatttaaaagaaaatgttccatcgacaagttcacacactactgtcccaaacattctgacattcttttccgtatgcaaaaaattgtatttagttgaattccccatgaaattctctctgctgcacatccatcgtcggatcccatcgtcggtgtcccgtcgatggcggccatgagcgagagcacctatttctggcaggagcggctccatacccctgcttcccctcctcaactccaccttgttgtggttcgttgctgagaaaaaggacaaacttgtacagttcctgttggtcgccttgctgccctggggcatgagctcatccaccaggggtgctggcagccgtccaagtggagcattgacgccagtacaagtagaattgtgcgctgaggtcaccatcttcaccaagcactgcacatccgtccaagtcgaccttgtacagtttttgaattttgctatggtctagcagttcagcatgtattctacttcagttcagtatgtcatttcagtttagtacatcggagtatcatgtatgccagttcagttcagtgcggaacattagagattcgacagacataatcatgtcacacaagttcaagtgtaggtacagaagtttctcgccataaagacattgatttggagtcttcttgacaaaacctcatctctcatatttgttcctatttttgtaggttccagcaaaataagatgcacaagttcatcttttgtatgcttttcagtacatctacttcccaatggtgagtctgatttcctttgtatttccatcttcatatagcacgaacaagtccttgtggttatgcttgagaatgagcaccgtactgtcacttagttaatcaattttgtagaaagctctcggggattttttatgtaaagctgttgataacttcataatcatacagatcatgcattatatccaatgaggcatcaattaaagcactttccaatatagagaggcaaatatacaagatacccaactaatatatactccctccgtaaactaatagattcccaactaataattatatttctttacggagggagtattaatgccctgcttagcacattgcttgtagttgtatcagttacctttattttggagttacgtaactactaaataatcaatagggatgacgcaccatcacgacctcttaccgtccccacccgtggttgctttcatcctcctgtgcgtgtatgccaccacggatgctacaaattcttgtgtggttcatcgttccctaatccggcgtgtgtcaccagtgttgtgttgtccttagccagcccccacggcttgccgcgatggtgcccccaagccggtctagaaccaccatgatgaatagaaatccatccaactattcacttatgccatcatgatcattttattgtataagtgtgccttctctgttgtattcaccttgttatttgcttgtccaaatttagttttaatccactacaatttccgctagtggatttaaaagtcaacaaatgcatagtttaaaaatgcatacaacgactacaannnnnnnnnnnnnnnnnnnnnnnnnnnnnnnnnnnnnnnnnnnnnnnnnnnnnnnnnnnnnnnnnnnnnnnnnnnnnnnnnnnnnnnnnnnnnnnnnnnnnnnnnnnnnnnnnnnnnnnnnnnttatttatacaaggttttttgggccaccatggccctattcttctttccatttattctgcatgctaaaagctagtggaagcatcaccgcggtcttatccattctttttttcctatgctagtagttgtaactagttaatgcttttcctggaaattacaaattcctcacacactatatcatggattcgtggccttttttggagctcttcagttcaacggttttttccgtttttgtggagcttgtcagtttaacagcttttcagttcatcaaaaaaatacagatgccagccactcatgcaacgtcctatagcagctagccagggatccttcctcggctcttccccttgatggtgagatacgtcgatcgaccacatgtctttctgtccgacaaggtggtcaggcaagcgccaaccggacgtctttgtctataccggcttgggacgacttctgggaaactgcaggttagaagttcatcttctaggctatgaagctttataagaaattgattccaggcaagttcaaaaaataaaccgcaacaagttcttgtttatttagcaatatatatgttgactctgcaaaaactcagtggttcaaatatgaaagaagaatgtaaaagatgttgnnnnnnnnnnnnnnnnnnnnnnnnnnnnnnnnngcctgatgttgctgctcctctcaaatctctctaactctattaattcatgatgctgccccatctctaagtgacacccacaggatcctatgcctccatgtccacattcagatgtgctgcaaagttcaattgtttcagttcgagcgggtgcacaaaacacaatgttctagtccgtactatccacatgtgctgcaagttcaagtgtttcagtttgaacatttgctaccctagtcatttgtttgttgctaaaaatgtcatagttgtacttctcattcttgcatgaaatttttctataccatcgtgtttatttctaaatgtcatagtcacttttttttgccgtcaggtgtttgctcaaatgcctaaacaaagatctattttagttcagttcaaattgtagttttagttcagtgaaaatcttattttaagttcagtacaatttcttattttagcatgggcaatccttcaaatgtcttgccttatattattgctcatccatcatattgtcgcaaaaagatttgttgcccatggcaacagtaaacattttattcatgaaaactcatgtctttatctattggctattggaaaatgtgttctggattgtagatcgtatctttctgtactctttttgatgtcagtatacaaaacaaaaaatattacatcaaagtggcaatgtttaatctattttgggttagtatagggtatacatgtatacaacatttaatctgtagtagtagtaacagtgttgctatgtaagggagcagccgaactccagtaatttgtgagaatatcttggatacatcagtgcaggaataatacattgttaattattgcaggtaggtcagaccttagaagccacttccagccgcacttgccggcacccacgacgcgccaccccaccggcccacacggcgtgtcgtcccacagttcgccgggtgcggcggccacctgagctccgccttgcgtggctgctcctgctctgccttccaggtgactagagctgcgtggatgagcgtgttatggaactgaatgatctacccaatcttaccaatagggaaggtacatcatgtacactatggtgcatcaaattccgcatcaatctgaacagtagggagcgtgttatgtcattcatgtatgaaaatgtgcggtcggtgtggtgtatatgtcattcttgtacatgtattatatgtggaaaattttccagtctatgatgatatgattgctacttcaaagaaggtatacatgacagtttgatgtgcgtgcaagaatgaacaaaatggttttaactaaaaacattggccagtacaaattaaaaacaatgatcagtttgaaataaaagaaatggccagtttgaattaaaaaccatgattagttcgaattaaaaaagtgaatgatcagtttaaattagagagaataattagtttggattaaaaatttgttttgaattaaagagaataatcagttcaaattaaaaacaatgaccagtttgaattaaaagcattttgaattaaaaacaatgatatgttaaaattaaaaacaagaaaaaccggttccaaaaaatagaaacatagaagtctgaattaaaaatgatcagttcggtgttttaaacaaaatccatttgaaacatttgaaaaaagatttttgctcaattctgacaaacgtttgaaaagtaaaaccagaacaaaaaaatgatgcattcttaccgcattcaaaactacaacttaatcaattattgaatttgaaaaaaaaacataaaaattcagtcaactaaaaggtataaaccatgcaagtttggacacgatgacgcagacggtttgaatgataaaacaaatttgaaggtaaaaccccaaaacattcagggactaccggggcgtatcaaggggttggtggtctatcagtacagtgtctgactatagaaaagttcaaacttttttggtagaatagttcgaaggtttgggaaaaacacaaaaaaaggataaataacatgcatggtacgggttgagcttcactaattaaaaaagtaccatactgccagaaaaactataataaagaaagcaacatggtcaatcttcttggcccacagccttcctttgtccaaatctgcagtctgaccaaatttgtagaaaattgtatctatttacttagcagtgacgttcactttctaatgaatctgaagttcgactagttccatttcttcaaaaatcacaagccaccacgtacgcaaggattgattctgtttgttacagccgtgaaatagcttagacctctgcacatggatattacatatgctctacatatgcgagttcaaacatcgatccgcaacgacccgaacaggctagtgagccacggcttcctcagaatgtcgccgtcgtgaatcgaaaagtatgtgccatgtcccgcatcaaaacaccatctcccagtgagattgcagagtcctatgcatcgtatttgcatggccgctggttacatgtcgcagaaaacggacgcaagctcccatggtgcatatgccgccgccatggattcacctccggatcgaacctctacgccggcaccaaaaaaacaacgccaaaagnnnnnnnnnnnnnnnnnnnnnnnnnnnnnnnnnnnnnnnnnnnnnnnnnnnnnnnnnnnnnnnnnnnnnnnnnnnnnnnnnnnnnnnnnnnnnnnnnnnnnnnnnnnnnnnnnnnnnnnnnnnnnnnnnnnnnnnnnnnnnnnnnnnnnnnnnnnnnnnnnnnnnnnnnnnnnnnnnnnnnnnnnnnnnnnnnnnnnnnnnnnnnnnnnnnnnnnnnnnnnnnnnnnnnnnnnnnnnnnnnnnnnnnnnnnnnnnnnnnnnnnnnnnnnnnnnnnnnnnnnnnnnnnnnnnnnnnnnnnnnnnnnnnnnnnnnnnnnnnnnnnnnnnnnnnnnnnnnnnnnnnnnnnnnnnnnnnnnnnnnnnnnnnnnnnnnnnnnnnnnnnnnnnnnnnnnnnnnnnnnnnnnnnnnnnnnnnnnnnnnnnnnnnnnnnnnnnnnnnnnnnnnnnnnnnnnnnnnnnnnnnnnnnnnnnnnnnnnnnnnnnnnnnnnnnnnnnnnnnnnnnnnnnnnnnnnnnnnnnnnnnnnnnnnnnnnnnnnnnnnnnnnnnnnnnnnnnnnnnnnnnnnnnnnnnnnnnnnnnnnnnnnnnnnnnnnnnnnnnnnnnnnnnnnnnnnnnnnnnnnnnnnnnnnnnnnnnnnnnnnnnnnnnnnnnnnnnnnnnnnnnnnnnnnnnnnnnnnnnnnnnnnnnnnnnnnnnnnnnnnnnnnnnnnnnnnnnnnnnnnnnnnnnnnnnnnnnnnnnnnnnnnnnnnnnnnnnnnnnnnnnnnnnnnnnnnnnnnnnnnnnnnnnnnnnnnnnnnnnnnnnnnnnnnnnnnnnnnnnnnnnnnnnnnnnnnnnnnnnnnnnnnnnnnnnnnnnnnnnnnnnnnnnnnnnnnnnnnnnnnnnnnnnnnnnnnnnnnnnnnnnnnnnnnnnnnnnnnnnnnnnnnnnnnnnnnnnnnnnnnnnnnnnnnnnnnnnnnnnnnnnnnnnnnnnnnnnnnnnnnnnnnnnnnnnnnnnnnnnnnnnnnnnnnnnnnnnnnnnnnnnnnnnnnnnnnnnnnnnnnnnnnnnnnnnnnnnnnnnnnnnnnnnnnnnnnnnnnnnnnnnnnnnnnnnnnnnnnnnnnnnnnnnnnnnnnnnnnnnnnnnnnnnnnnnnnnnnnnnnnnnnnnnnnnnnnnnnnnnnnnnnnnnnnnnnnnnnnnnnnnnnnnnnnnnnnnnnnnnnnnnnnnnnnnnnnnnnnnnnnnnnnnnnnnnnnnnnnnnnnnnnnnnnnnnnnnnnnnnnnnnnnnnnnnnnnnnnnnnnnnnnnnnnnnnnnnnnnnnnnnnnnnnnnnnnnnnnnnnnnnnnnnnnnnnnnnnnnnnnnnnnnnnnnnnnnnnnnnnnnnnnnnnnnnnnnnnnnnnnnnnnnnnnnnnnnnnnnnnnnnnnnnnnnnnnnnnnnnnnnnnnnnnnnnnnnnnnnnnnnnnnnnnnnnnnnnnnnnnnnnnnnnnnnnnnnnnnnnnnnnnnnnnnnnnnnnnnnnnnnnnnnnnnnnnnnnnnnnnnnnnnnnnnnnnnnnnnnnnnnnnnnnnnnnnnnnnnnnnnnnnnnnnnnnnnnnnnnnnnnnnnnnnnnnnnnnnnnnnnnnnnnnnnnnnnnnnnnnnnnnnnnnnnnnnnnnnnnnnnnnnnnnnnnnnnnnnnnnnnnnnnnnnnnnnnnnnnnnnnnnnnnnnnnnnnnnnnnnnnnnnnnnnnnnnnnnnnnnnnnnnnnnnnnnnnnnnnnnnnnnnnnnnnnnnnnnnnnnnnnnnnnnnnnnnnnnnnnnnnnnnnnnnnnnnnnnnnnnnnnnnnnnnnnnnnnnnnnnnnnnnnnnnnnnnnnnnnnnnnnnnnnnnnnnnnnnnnnnnnnnnnnnnnnnnnnnnnnnnnnnnnnnnnnnnnnnnnnnnnnnnnnnnnnnnnnnnnnnnnnnnnnnnnnnnnnnnnnnnnnnnnnnnnnnnnnnnnnnnnnnnnnnnnnnnnnnnnnnnnnnnnnnnnnnnnnnnnnnnnnnnnnnnnnnnnnnnnnnnnnnnnnnnnnnnnnnnnnnnnnnnnnnnnnnnnnnnnnnnnnnnnnnnnnnnnnnnnnnnnnnnnnnnnnnnnnnnnnnnnnnnnnnnnnnnnnnnnnnnnnnnnnnnnnnnnnnnnnnnnnnnnnnnnnnnnnnnnnnnnnnnnnnnn

SEQ ID NO: 22 - DNA, 15026 bp, Artificial Sequence
  Scaffold 1538547
  misc_feature (3103)..(3152): n is a, c, g, or t
  misc_feature (8087)..(8215): n is a, c, g, or t
  misc_feature (11268)..(11386): n is a, c, g, or t
  misc_feature (11661)..(12104): n is a, c, g, or t
  misc_feature (12416)..(12603): n is a, c, g, or t
  misc_feature (14107)..(14911): n is a, c, g, or t
tcattaccccctatcgaggttgccgggttgtctgctacatgaaaaaacaaccggtagtgtccataatgtgtcagtttactgctaaccgtacaacatcgattcttgattatgtttaatacccacctgatatcaaatggaaaggcccatgaatatatgtgatatcaacatcagtttgttggggtacaaccggttgcggggttgttccatcacacatacttatcatccattggtagttaacacaatcaaaggattcctctgtgttatctgcaaccacttcagcaattattttcacaatcctgaaatatgaagatatgtatagcaactgctacaggaaaaactataacttggcgatacttctgactcggagcgctcaaccggacatattagatacacaatgctttccttgaaggtgtcatactgctgtaatatagcaaggtcgtacctgctaagtcaagtgcagggagatgttcatggagatgattgttggcggcgttctcatttttctttcgatgtccaccacgaatcggagccataaatggctccttgttatcgccagcgtccgatttgctcttacaatacgatgcccgtctccgattgtttattaggtccctcttgtcaaatactgagtgaaacatcaagatgtgagagaagtgaatcacggaatgcacattgtattaatggtttctaataatatttaataatcaaagaaacataccagacattgaaacggaagattgatattcatgatgtagtttcgtagcttcctcatcttttttcttccgataagcagctcgccgcttggcgtttatctgctgctttctttcatcagagtagataactttcttagttttattgtggacatagctgcatgatcgtgtagtcatcttctcggatgttgagtcggatgcaggtaaaacatgagcagctgcattaatgtataattgtcttcttccatctatacgagacaactcaggagtctctgtcgcaacagaagagcaacatgattgttgtacatatgcaatataaaaacataaaccatgctaaggttcacaaattaagtagaatcaggtaataccatttacactttgtgctgcggctgtggcagactggtttgagatacaactgagaggcacaaacgaagcattattcaatatgaatgagctagccggattgtctgcttgatgaaaaaataaccgatagtttagtttactgctaaccgaaatgcgtcgtttattctttatgtttaattctcacctgagaccatatcggaaggcgtctgaacatatgtgatttcaccattagtgtgttggggaacaaccggctgtgcggtttgacttgttatatcccgatctgaagctggttcatataagtaaccaaaatacagttaatcaatttcagacactaaatttatgggcactctctccgcatagtctcataccttgaataatagggttatcatcatcaaatattgtcccatccatatcattaagcggaacaacaggtagcggtgtggacccaactggcataattggggtatttgggtagttctcaacatcatatgtcccaaccaactcatctgcaacaacttcatgacatgaattcacaattgggatctagcttgacatgtatagcaagatttttaggttaatatatacctggaggtacatccgtcggtgtcatactttctgctgctttgctttgtggattccccatacgtacctgtaagcacatattttgtaaacacttaaaatctatgaaatgctttttgccaagtttattcttgttttcttcctgatatgcagaaatttcaattagaatgtagaagacattgttcactatgtatttgcatatataaactgattggttatatatgcatttgttctttctattctatttcaaaaagtacaatatagccaaacattatattttgacaaacattccacatatttctcaatccaaaacttgatgcatcataatggtttgtgtcctaaccggcatctacgcattaaatcttcaaaaacagcaaaatcagaaaggaaaataattaataaacactaaaattgccgccatgctaagatgatacactcactcttatctattgtttgtggtgcttgcataatcagtcatgtgcatgcatgctactttaaatactggtgttacactcacatataattgtatatataggcttgatattttttgacgcattcaaacgtactttcagggagcagtgagacccattacaagatggtcaatgtactttcagggagcagtgagacatttgaaggtacagtttatgaatgatgagttttatgacaatgacacccatttgtcacaaactgatgagaaagctcgagcaatttgcagcctctttaccatatatttaatttgttacacagttttttggcacacatgaaagctgggtagatgtcgcggctgcggtgttaggctatgttacggatgagtcgaggacggcccaccagcctgcactgcacctcaatggcagctgtcgagagcatctcaggtacgctctatgcagttgtgtgtacatcttgtagtgctcttctatgtggaatggattctcctctcatcctgtttggctagatcagatgtattttgggggtgctaaatcatggtgattactgaatggttccagtttgatgaatgaaagcattgtaatgttaaaaggaactggattgcaaagtctaaatacttgattaaccaagtaaaactcttatgctgtctagatactgaagaaataaatcaatgccatgcagatcatgcatcccgtctgggtgtccaggagcgaaagtcggatgtcaatgcatgtatgacagaatcaatttgtggatatttcaacaatggatgtaagacagaaccaatgcgcggatctgttgaaagtatgtactgtaagcgcaaccgttgtaatacctacccaggaactgggaaactgggatcagccccggcagtgtccacaagggaacgcggcgcagtcggttcctgtgcgtgatcggcggcgactcctaaacggcaacgcgggcgccgtccgctgaagggcgacggaggcgaaacttaggatcggcagcggcaaaggcaatgatgtccnnnnnnnnnnnnnnnnnnnnnnnnnnnnnnnnnnnnnnnnnnnnnnnnnnaagatccgatctgggcacgacgcatcgatcgggcgttttttttttgcgttacttctgtgacgtaacgtgggcggggcggtagacgaagaaaaaccagcgaagggaggggatagacgattaaaaaccagcgaaaaaaaaccggaagactattcaccaactgctatattaggagtagagatccatctacagcgatattttttacctcgcccaccttctcctccctgagcgaaaccctatctccgacctcgttttctttcgctcgtatggtggcggcggtagatcgagggcaccctgctgcggaagctgctaatggtgtcagggccctccatggcgcgcagcggcggacccagcgtgcgccgcagccggaccagcctggtcacgcggcggcggcccagcctgtgtgcgtgacgttcattctcagtgggagtacctacgtgcgtgcgtcctctcatccctctggttcaactcatcgatacacttctcaattccatcgaagcaaatgagggagagtcatggtgatgtgggtactggctatggcctccttgagcgaaccccgggcgcgcctatgacacccgcatcttcgccttcgtcagagactaccgccacaggttatgattaactaatgagtagggtcgtagtcatccgatctttcacacttatcagtactaaatattgaccctctgtttttttcttcttcttggattttgtctgtcatatactgacatagagcacagaccacaggggcacgccggagttcaaatggaggaccgtcaagctcaaccaacaaactgggttaatatgtgtacgacgctcaactctctgctctcaatttagatgaatcgcttcggtgcggggattggttcagatattagttttgttctgttcttcctagttagtgagttcttattggtcaatcgtgagatgcttgtatagtagacccccagtatttactaggtcagatagtccttgtttgtgtcagtaatcttgaactcatggaagctagtttatacgtgtcattaagttgaaaattgtaaactgaactgtacctgctctgatttatccttttagggaaattattattagaacctaactagtacatgtgacttgggttagtaacgaaatagtgagctccaatattttcattatgccgatgctcccccagtattgttatgttattttgtagttctgagctcatggcaactcggtttgagggtgtgtgaatagatttgcaagtgaatttttgttgtaaaactgccattggagttttatgagcgatttaacatgattttggtaaattgctagtggagatctaattccctgcacttgtttgtggcaatcagaagtgatgctgactatatgttaatgcatattactgtccaagcaagtagatactacaactaaagatcaaagcctagactagcttttttattcggcatgtgaccatcgcacaattgttagtaatttattttcaaacggaagtatcttattgatcaaatgtgtgccaaggacaacaacgaagctctgcgaaacttcttcatgctttcttcactattctagctgcttcaaggtttcttccttagtagttttgtcaaatatttttttctgcaccattttaattccaatttaatatttcagatgacctttgttgctcacaaatacgacatgtttagttctgttcatatcacttattagacaagtactatcatgtctttatttgttaagattccaacctagagctccgagttataacttccgtgttgttctttgttgtagtggtcgatggttttttctaactcattcatgctgctgtatttatgtctttgtttctaataggttgattcgtaagtcatctttaagaagttgatatggacaaaggaggatcaaaacaactctagctgccttcatgaagtcacgagaagaggcatccaacaagctttcatgtttcgattaacgtgggagctaagactcacaccaagaaggtctatattgatgacctccaaatgtttaaaaaaaatatgttgcatcaaacgattatgtagcttgggttatgttggatcatgtaagtgtttagtgtacatgttgtttagagacaagttagcttgtaatgtaatgtggaaattggtcaatgaaaagatggtcttaaaaacaccacaagcccacaattggttttgaatcggaccaggccaaactaatatgagagaaaataactataaataatacaattcttgaaaaggctagcagaaaatggtgactgcaagtgggcgttagcgcgccacgcaagtctgcaatccagcagcggtcctggagcccctccgccgcggtgcgtttgcgacgccgtcgggggacaaggggaaggaggttaggggcgatgtccgcgatggccatgccgtcgatccaagcatcagtccagaataggttttgagttttggtacatacgggatggatattatttggttccctgatgtttcttagctttttgatctgtttcagtcagcgacatggagctataacttgtgcaattgatcgaggcataaattacattcttacggtgatggtgttcaatgttgtcacggttgctaatatagaataggttgcttttggtaatttatgccacttattctcggtcttgcgtcagctctgtctgccttgcgcttttgcttcttatttacagatcggtgaggtgtcaagtgtacttgcctacaacttaagttccacttttgcttgtataatttcagtttcagtcgctacatgtattgctttcactttggttgtcacacaggtaccaacactgtgttctgtcatcacatctgtgtcttaggatattgttattaccttgaatgctcaatttaaggatgtctttcttatcatgtattactccgttcccccatagattggttgtttaaatatattttattgctgtattaaccacttttttataatgccatcggaaagtcgaacttcaaggatgcagcaccgaaaacccaaagtagccttgcctacctgaactttgggcaaagtgttatatttagctcggcattatccacagcaatgattttgagctcataggtggtgctttggctctccagtgcattggtaattctgtatgtcaattatttttatttcatttcttctgctgtttcatttcttattttcgtcggacatgttttcattgcagtacatgcacatcaagcagaaaattgcatcactaagcaatctggcccctttacgaccaagaagcggagtcgatctcccacatcctaactgaatttgtcttcgccagggggtttgacagtgtcctcagcacatggtcgtttcagttactgtgtccgcagccgggcgacaccttcaattcatggttctaatctgctgaagagcaagccagcccgggcaagatcaagggttcacactccgtgatcctgctgacaatgtgacgcggcgtggagactacaaaatgactgttttttattctgtcagcccggatgtcgctgtctggtggagaaataaccattgaagcaaagctccgggtgctcgctggtgcaaaagcacgaacccgcctgcacgcgcgccctcctgaatcctgatgtttgatcgcaggcgtgtagtgaagctgtacagtcgatctcacggaaaagttgaggatttttcaacgatggtgctaccactgcaacatcagttaaaggttccattggttacttaaatttatctagtcatgtcctctgaatcatgaatctgatgatttatgagtacaccatgtcctctgctatatatgtaataagacctatgatgttcttacatacgattcctgcttgaggagtcattgattttaacagacagaaaaggcaaggtggatatcatcatcatcacattaacgagcatgttagacagacagcatagtagatgaactggaaactgcaactctatctgactgactgcagatagattgtgagcagccatctgtgatcctgaaacattctcaatagctggtgcaaatcatcatcattatgatgtgtctgttcttgacaggaattgcaaacacttgctacttacaagtatccccatgatattttggtctaagaatcaaatctatagacccaaagtggtcgggcccttccccggaccctgcgcaagcgggagctacgtgcaccgggctgccctttttaatcaaatcaatccaagtttcacaagtatacatgcatgctcataaagagaaacagtgtttaccaaacaatccagttggttgaagtctcacaaaatccaagctgattccaaggaaaagcagaacaatcaaattgatttgctgccctgctctatcagtatttttgaagcttcttacgattctatcataaaaccactgcattttccagttatgcgaaatgatgatataaagaaactgcatgatcatccactcattgcaaaaatccctatggtgaaatgtttcgtcagcgaatcacattacagagatgaatgtcagaagagcgactacatccagcgccaacaatttcagcagtcctgcagcataggatcacgaggccaaaacaccagttctgtcgacggaacggagcaagtttacctaggagaagaaacacgagagctgctgattgcatttttctaaacctatatctatctgttctataggcaaaagcaggcgtccagttctgctgtcatcgtatcctgaacatgtgaaaaactcccactctgatcttcatctactctgcatcgacatccgggtgttgcagctcacatcctaggctgaattagcagaaattatgagcgagttaggcaggagacatgatcaataacaatatcaaggaggaaaaaaatcttcaaacaatataatgtgcaaggaactaagctttatgcgctattgtaagatactcactgaattatattcaaaggttttcttttttgaagaattaattcagaggtaagaaaatnnnnnnnnnnnnnnnnnnnnnnnnnnnnnnnnnnnnnnnnnnnnnnnnnnnnnnnnnnnnnnnnnnnnnnnnnnnnnnnnnnnnnnnnnnnnnnnnnnnnnnnnnnnnnnnnnnnnnnnnnnnnnnnnncaaaggtgaaatgagatgacagaacttgatttgcctatctatccataggcaaatattccagaatggaactgaattgttagaatcaaggactggacaaatccacatggcacctactatttccatccaactacttctactcttttataagactgcaacagtttcaggcaactaccaaatcctaaatgaactactttttactcttctataatatcctttttccaagcacgatcagaatagcactcaactaaagtaagattctaaatattttcatgcagtaaaatagtatctacaccaagatatgtacactgtgcataactgattcaatgccagagtacactcttggcagaagatcagcaggaggcagatgaacaatctaaatctcagaattttgtagaataaaaaaaaacaagatcaaagattacagctcatgtacaagaccagaatacagctcatgtccagaaataagatccatttaattagaattgttggaacctgaattttgttcacagagttattcgacgcaagtaaaatgggctaaatcaaatggataccaccatcttctatgttaaggccaaaaggagatgaatcgacagatttggagttttaagttccataatgatttattcccccaataacagatcttcttttacttatctagtacaagattacaacagttgcatgcagacaatgcccaacacctaccagttttagactactcgcaagagtttcagttaactgttttttcaagctacaacagtttcagtacactgtttctgggactaaaacagtttcagtaaactgtatcaagcacaagcagattagcacaataataaaacccaaaagatcattttaatgcagcaaaccgcatccacaacagaatctgaatgttgtgcatgaaaaattaaatcaaagaccttcagttactgcgcatgacaaattcctaagcaaaatgttagtgtacctgtcctgtaccttcaatcaaacaatataatgtgcaaggaactaagctatatgtgctactgtaaaaagaacaacctgaattatattcagaggtttttttgaggtattaattcagaggttagaaaattagtatattatctgcaaaggtgaaataagatgactgaacctgatttgcctatctatatataggcaaatgttccagaatggaactgaattatctgaatcaagcactgaacaaatccacatggcaaatcaaactacttttactcttctataatatccttttccaagcacgatcagattagcactccactaaagttagattctaactattttcatacagtaaaatagtactatctacaccaacatctgtacattgtgcataattcttaccaaagaagatcagcaggaggcagatgaataatctaaatctcagaattttatagaataaaaaaaacaagatcaaagattacaactcatatacaaaatctgaatacagctcatgtgcagaaataatattcattttagtattgttggaacctgatcaattttgttgacagagctattcagcgcatttaaaatgggctaattcaaacggacatcaccatcagttcccaacacgatttgtacatgttaaagccaaaaggcgatgaatcaaacgatttagagctttgagttccataatgatttattcccccaataacaggatcttcttttacttatctactgtagaagattacatgcagacaattcccaacacgtaccagttttagaccacaagagtttcagtaaactgtttcagggactaaaacagtttcagtaaactatttcgagcacaagcagattagcacaaaattaaaccccaaaagatgattgcaatgcatctgaacgttgtgcatgacaaatgtaatcaaagatcatcagtggttactgtgcaaaaccttagtgtacctgacagattgtagacgggaccccacttgatccaagtaccgcaacacggacaacgctgccgtcggtcgtggcagtcctcgcacagggagacgtgcccgcaggggccaagctgcacagccggcggcctgatccagcaatcctggcaccgctggatcgccgcgtggtggtgccggtgcggcgccgcgttgccgtagtgggcaaggtgggagtgggactgcatcccgaggcgcggcggcacgaactggggcagatgtccctgcaaggccgccccctgtccctgtgggtggaaggacggcagcggaggcgtcggagcgaagtcgtcgtacctctgcgaaggagtcgtgtaggggtaagcgcgtacgtcgatgaacagcgccgggcgccctggcgcgtagaggtggaagcgcatgtgctgcggcggcgccgcgaactgcatcgggcgcgtcgcgttgccgtagtgggcgaggcgcggcgccacgaactgggacagcggccccgtaggcaccaggatgaggtcgcggggcggcggcggctcgacctggagcgcctcgacgtcctgcggctcaccctggagtgcctcgaggtcctggaagaagtcgccgaaggtggtgccgaacctgtagccgccgaacgcctgcgcagctggcgagagggtgggcgcccctgcaggaattgctccgattagctggcaagaaggcaagaaaccaacagggaaactcggttcggctgaaacgggtccgcacctgagagaagtgccgccgcttcggcgaggcttcccggagacgcgcagatcggcgggcgcacggagatggtcgccgcggtagagctcgtcgcccgcgcggtaccgcccgcctcggcatcgagatcctcgtcggaggccgcggtctccgccgcggtatcgcccccctcggccgcgtcggctgtggccgctgtacctggcgcggtatcgtccgctcgcccgcagagcgagtcaagcgagaacttgacggtgtccctgtcgaaggagtagctgggagccttccctcgttcccgtcggtccttgcccttcctcagcggccgcgcaactctcccgctcctcggaggacgcggtggcgcggtacccagaggcggaaaagaggtgtcgtcgaggaggtcgggcatcnnnnnnnnnnnnnnnnnnnnnnnnnnnnnnnnnnnnnnnnnnnnnnnnnnnnnnnnnnnnnnnnnnnnnnnnnnnnnnnnnnnnnnnnnnnnnnnnnnnnnnnnnnnnnnnnnnnnnnncgccatggacgcggccgttgggattggcgggagtctgaaggattggtgggggaggcggttgggccgttagtaggggccgggtgctgccctccctcccgtatttatgcacaattcatgctacgggccgaatccagcgatggaagtgcataacctgcagcctgcaccatttcttcttcaccttcagaaccggaaaccatgcaatggatgcacaccttgccaggaggagctgaatcttctgagatgacactagacatcaacacatatatctgaagaannnnnnnnnnnnnnnnnnnnnnnnnnnnnnnnnnnnnnnnnnnnnnnnnnnnnnnnnnnnnnnnnnnnnnnnnnnnnnnnnnnnnnnnnnnnnnnnnnnnnnnnnnnnnnnnnnnnnnnnnnnnnnnnnnnnnnnnnnnnnnnnnnnnnnnnnnnnnnnnnnnnnnnnnnnnnnnnnnnnnnnnnnnnnnnnnnnnnnnnnnnnnnnnnnnnnnnnnnnnnnnnnnnnnnnnnnnnnnnnnnnnnnnnnnnnnnnnnnnnnnnnnnnnnnnnnnnnnnnnnnnnnnnnnnnnnnnnnnnnnnnnnnnnnnnnnnnnnnnnnnnnnnnnnnnnnnnnnnnnnnnnnnnnnnnnnnnnnnnnnnnnnnnnnnnnnnnnnnnnnnnnnnnnnnnnnnnnnnnnnnnnnnnnnnnnnnnnnnnnnnnnnnnnnnnnnnnnnnnnnnnnaaaaggtataaaaacaaacaaaaccataaagaaacaaagaaagccaaagagaaaaagaaaacaagaaaaacaaaagagaaacagaaaacaaagaaatcgatgcaaaacagtggaaacatagtgaaaaattaacataaaaacaaagaaaaccatgaaaataaccgaatcaaaaagaaacaaatcgatgccaaacagtggaacaattgtgaaaaccaagaaaaacgataaaaccaaaatagaaacccaaagaaaatgaaaaacaattatgacacaaaatgttgcttggttgctgaaatcttctgagatgacacnnnnnnnnnnnnnnnnnnnnnnnnnnnnnnnnnnnnnnnnnnnnnnnnnnnnnnnnnnnnnnnnnnnnnnnnnnnnnnnnnnnnnnnnnnnnnnnnnnnnnnnnnnnnnnnnnnnnnnnnnnnnnnnnnnnnnnnnnnnnnnnnnnnnnnnnnnnnnnnnnnnnnnnnnnnnnnnnnnnnnnnnnnnnatgcacaatttgtatgagaaaaaggagccatcaaaacaaatatatgaaaataaaatgttaaacatacatctcaaaattgttaaatgagtataaaataatgttctaactatatgcaaaaaatatacaatctgtatggaaaaaagctcaacacatatttttttattcaaagttaaccatgtgttttaaaaataaaaaatgtggataaaaaaggttcctgctatatacaaaaattgcacagtgtgtatgaaaaaggtataaaaacaaagaataccatagagaaaaagaaaacaggaaaagccaaagaaaccgatataaaacaatggaacatagtgaaaactaaaataaaaaacaaagaaaaccaggaaaaaacaaatcaaaaaaagaaacaaatcgatgccaaacagtggaccaattgtgaaagccaagaaaaatgataaaaccaaaaaagaaaccaaagaaaatgaaaaacaatgatggtagatgacaaagaaacaaaataaaatcaaagaaaaataaagaaaaccaagaaagaaacaaataaactagatgaaaaaacaagaaaaaaagaaaaacttgaaagaaacaaagaaaaaaggtgaaaaccctagaaaacagaaaaacagagataagccagtgaagaaacaaaaaacaatggagaaattcagttgagtgagatattatcttcgcggttgggtggtggagagtagatatactgtttcaaaaaaaaaaaacagatttagatggtgcatgagccagcctggttctcatgacatgcattttggaaagatggtgctcctttgagaggaaactggattctgccggtggtgctgtcacaatttaagaaatttgcaagttggatgcctcgttgctccagccagcgccggtgatgcggcgaaccctcgcctcagccttcggcgtctcccctctcctcatgtccacctctcgcagttgccggcgggttccaatgggcgaagcttggagggcattggcggccgagaggccttccctcattccctataaggcagcggcatcaccgggggcaactgccccatcaggcacacagtgctccatgaggggcacggtggcggagttgcacgcaacaatgttggaggggcgtgtgggacgcggcgacttgatggcgtcggatgcgctctacatggcgcatctcgctggtggcagcagatggtggcgctctgctgcgtttgcgggctggtgtgctccaacggggttgggctcgatgtgttgcggcttgcattggatggattttgttgtggacgcggagaattgagccctagcgagcttggagttatagcgagcacagtcattcataccagtgatcgtaccagtcccagacgaaagctcactagtagagaaacaaccattagcagtggccctcggaagcgattgtgatcaagcagaacaaagttgcctctaatatttcagcggaggcggttattttcgccatggaggggttggaaatttgaaatcgcctataataatccannnnnnnnnnnnnnnnnnnnnnnnnnnnnnnnnnnnnnnnnnnnnnnnnnnnnnnnnnnnnnnnnnnnnnnnnnnnnnnnnnnnnnnnnnnnnnnnnnnnnnnnnnnnnnnnnnnnnnnnnnnnnnnnnnnnnnnnnnnnnnnnnnnnnnnnnnnnnnnnnnnnnnnnnnnnnnnnnnnnnnnnnnnnnnnnnnnnnnnnnnnnnnnnnnnnnnnnnnnnnnnnnnnnnnnnnnnnnnnnnnnnnnnnnnnnnnnnnnnnnnnnnnnnnnnnnnnnnnnnnnnnnnnnnnnnnnnnnnnnnnnnnnnnnnnnnnnnnnnnnnnnnnnnnnnnnnnnnnnnnnnnnnnnnnnnnnnnnnnnnnnnnnnnnnnnnnnnnnnnnnnnnnnnnnnnnnnnnnnnnnnnnnnnnnnnnnnnnnnnnnnnnnnnnnnnnnnnnnnnnnnnnnnnnnnnnnnnnnnnnnnnnnnnnnnnnnnnnnnnnnnnnnnnnnnnnnnnnnnnnnnnnnnnnnnnnnnnnnnnnnnnnnnnnnnnnnnnnnnnnnnnnnnnnnnnnnnnnnnnnnnnnnnnnnnnnnnnnnnnnnnnnnnnnnnnnnnnnnnnnnnnnnnnnnnnnnnnnnnnnnnnnnnnnnnnnnnnnnnnnnnnnnnnnnnnnnnnnnnnnnnnnnnnnnnnnnnnnnnnnnnnnnnnnnnnnnnnnnnnnnnnnnnnnnnnnnnnnnnnnnnnnnnnnnnnnnnnnnnnnnnnnnnnnnnnnnnnnnnnnnnnnnnnnnnnnnnnnnnnnnnnnnnnnnnnnnnnnnnnnnnnnagaggtcatcaccgccgcatctgctcggcggacgtcgtcgattcgtgcgctagaggtcgtcccggacccactgagcatccatgtgtgttcgttgtgagctccttcttcctatccc

SEQ ID NO: 23 - DNA, 4667 bp, Artificial Sequence
  Scaffold 1549600
gagagggggggcggcgccccccttcctcttcccccccccccaagtcctaatccaactaggaaaaggggggggggggagtcctactcccggtgggagtaggactcctccggcgcgcctcccctagggccggccgcacccccccttgctcctttatatacgggggcaggggggcaccccatgacacacaagttgatctacggatcattccttagccgtgtgcggtgcccccctccaccatattccacttccatatcgtcgcggagcttaggcgaagccctgcgccggtagagtcatatcgtcgcggagcttaggcgaagccttgcgccggtggagcatcatcatcgtcaccacgccgtcgtgctgacgtaactcatccccgacgctttgctggatcggagcacggggatcgtcatcgagctgaacgtgtgctgaactcggaggtgccgtgcgttcggtacttggatcggtcggatcatgaagacgtacgactacatcaaccgcgttgttataacgctttcgcttacggtctacgagggtacgtggacatacactctcccctctcgttgctattccatcaccatgatcttgcgtgtgcgtaggaaaattttgaaattactacgttccccaacacctgcacacgcaaggttcctttcaaaccatccacctatcttattgcgcacacgatcgccgatgtggttaaaagtgccgctagtaattcttccgatagcagtaggcagccctaaatagcgttcggagaacgcttccaccataattccgagagagtttttgaggatctctctgctaggctgtcctgtgtttgcactgaagaaactagagctcttttctcgattaactgcctggcccgagcactcggcataaatccggagaatttcattgagcctgtctgcacttttggtatttgtactgaggaagatgagactgacgtcagcaaataaaagatgattaacccaaggcacatgtatacttacccgaacacctctgtcgatatatgcaccaccatagtggtttaagagggaagtgagaccttgtgcacagataaggaagaggtatgtggacatagggcagccttgacggagacccctcgtgggatcaaagaacagcaggagctccccattcaccttgatcgtgaaccggacggaggtgacacatttcatgatgagtctgataaagcgatccccgaagcccaatctgaacaacattgcttcgaggtagtgcaactccacccggttgtaagcctttaacatgtctagtttgatcgcacatcttgcattgttgcccttcttccttctgcgaatggcatggacacattcgtaagcaaccagtacgttgtccgttattaaacggcccggtacgaaagcactttgctcctcccctataacatcatcaaggataagccgaagcctattagccacgaccttgacagcaatcttataaagcaccgggcatagctgtgtcattattgtgaaattttctgcggattacagactttaggaatcaatgtaatagctgtgtcattaagtcccaacggtggctcaccaccgtttagaaatcccagaactgcttgggcaatgtcatcaccaaggacgtcccaatgtagttggtaaaagcccgccgtaaaaccgtccactccaggagccttggacggtgccatttggaaaagcgcttcctttacctcggctgccacatattccttttgcaaagcttgattcattgcctctgacactcgaggttgaacgcagtccaacaactcttccatgggcgcataaccttgagaaaggtatagcgcctggtagaagcccaagatctccgccttcaactccactggatcggtgcatacacgtccgtcatccgcctccagcgaggtaatcctgttaatgcgttttctttgtgctgcctgggcttggaagtaaccggtattctgatctccttcccgtagccacgacacacgagaacgttgcttgagccagatttcttcttgtcgcaaggcctcccgcaactgctttgctacgctagcttcctcctcattagggcctcgacccactgaggcgatccgtagtttgtccaaccggttttgaagccggtgaactttcttctgcatattccaaactcacgttggccccaatcgcccaactgagactgaaccacggttagagcctcaatcacaccttgtagtcccctttgaccagatcccgtgcgccacatcgcacgtaccacttcatcatagtctgaatggctctgccatacattttcatagtgaaaagagcgccgggctcgagtccagccggtcgcccctgatactttaagctcagctggtacataacaatgatccgattccacgctactcaagtgttttacatttgtaaactcaacaggtcaaggaacgaagagttgaccagagcacggtctagttgagccttcacgtttgcgtctccctactgcctgttatcccatgtgaaagggacaccccgccaccccacatcaaggagtgcacaatctgccgctgcttccctgaaagcgcgcatttgcctctccggtctcgcattggctccaaaatgctcgtccccatgcagcgtctcgttaaaatcacccatacaaatccacgcttcatgttgaacagcaaacaaagtacgtaaaagctgccagctaaggtatctattggccactctgggctcaccgtagaaccccgtgaagcgccaactcttattatctttgtcgactttgacgtcaatgtgagataaactgaagctttgcagagagacaacaacctcctttgtccaaatgaggccaactcctccgctcaacccgtcgctgtcgacagcaaaacagcctgaaaagcccaaagtaaacttcaaatcttccacacacttgcccttgattttggtttccatgacaaacaaaagggtggaagcttcttgcttcacaactttgcgtatgttttatttattattagaagtcagtgtacatttttttaaaacaacagaaaaggaaaataaaaaactggtcaaaaaactagaaaaatgttcacgtattaaaaaatgtatgtggatttaaaacaatcatgaatttgaacattgtttgaaaattcgaaacatgttattttaaaatggaccctagttgcgtatcatgggtggaattgcaactaagaagaatattagtcgggcccccaattgcgtatcgagggcggagttgaataataataggtacttcagaacattgttacaagagtaaatcacctctacaacttcaaacatttttgcaacccgagaccctcgacaaacacacacagacccctagttgcgagtcgatgctcggcatgcaactagggacccatgacgaacacacacacacacccctagttgcgagtagttgcaattcgatgctcggcatgcaactggggatcctcgagaaacacacacacatccgtagttgcgagtcgatggttgacaagcaactggggaccctcgataaagacacacacccctaggtgtgagtcgatagtaccctcgacaaacaccaccagttgcgagtcgatggtcggcatgcaactggtggccccaacaaacacacacacaccctagtagcgagtcgatggtcgacatgcaactggggaccctcgacaaacactgttagttgcgagtcaatggtcggcttgcaactaggggccacgataaaacacaatccccctagttgcgagtcgatgctcagcatgcaactagggaccctcgataaacacacacacccctagttgcgaatcgatgttggaattcaaccggggacactcgacaaacacacacacccctagttgcgagtcgatggtcgtcatgcaactggggaccctcaacgaacacacacacacacacccctaattgcgagtccaatggtcgtcatgcaactagggaccctcgacaaacacacacatacatacccctagttgcgagtcgatggtcggcttgcaactagggaccctcgacaaacacacacaccctcctagttgcgactcgatggtaagcttgcaacttgggaccctcgacaaacacacacacccctagttgcgagtcgatggtaagcttgcaactggggaccctcgacaaacacacaccccctagttgcgagtcaatggttgacatgcaactggggaccctcgacaaacacaaacacccttagttgcgagtcgatggtcgacatgcaactggggagcctcgacaaaatagactcgcctagttgcgagccgatggtctgcttgcaactagggaacctcgacaaacacacacacccctagttgcgagtcgacggtctacttgcaactggggaccctcgacaaacacacacacacgcacacccttagttgcgattcgatggtcgacatgcaactggggacccatgacaaaacacacacaccacctagttgcgagtcgatggtcggcatacaactggggaccctcgataaacaaacataccactagttgcgagtccatggtcgtcatgcaactagggaccctcgacaaatacacacacaccctagttgcgagtcgatggccgacttgcaacttgggaccctcaacaatcagagacacacacccgtagttgcaagtcgatggtcgacatgcaactggagaccccacgaaaaaacacacacaccccccccc

SEQ ID NO: 24 - DNA, 28545 bp, Artificial Sequence
  Scaffold 1872406
ttgatggaggtaaaaccctacgtcctgctcgattgatattgatattgtggatgtttacaagagtggatctaccacgagatcaaggaggctaaaccctagaagctagcctatggtatgattgtaaggattgttgttctgatagtcctacggactagagccatccggtttatatagacaccggagagggctagggtcacatagagtcggttacaatggtaggagatctacatatccgtatcgccaagcttgccttccacgccaaggaaagtcccatccggacacggggagaagtcttcaatcttgtatcttcataatcttggagtccggtcgatgatgatagtccggctgatgatagttcggctgatgatggtagtccggctatccggacaccccctaatccaggactccctcaactaccctacaggtgaaggggatattcttctggaaaatgctttaaggagtacatgtctatggagaaaggagtacatcaagcttccaaacttgacgcctcagcagactcagctagatgaggcccctcagtagattgatcttccgcctcagctgtctccggcgtgtcagcgcactccacttcctgcagtgcatcagcggactctgccgcctcagcaacggtggaagagagatgcggccgctccgggggctagcagtacaagaggtgggaagaaattcaaatttggtccaaacctcaagtctcctccaaagttaccatatgagaggactgacgaggaaaacacagacatcatggaagccgatgtgcgtgcccattttgaatggaaacgtccacctccgaaggaaacaatagatccggtgaaagcaaaacgcactctggatgcccttaagcgaccaccaccacctccgccacaatccaactatggccgctatattgaaaagacatacgatggagcatggaggtcgggaagtacttaagtaagatccttcaagtaagttgtcatcggtgcaagcaataaaaattgctctctaaatatgcatgacttattagtgcagagaaaataagctttgtacgatcttgttatgaagcaataaaagcgacggactgcataataaaggcccatatacaagtggcaatataaagtgacattctttcgcattaagattttgtgtatccaaccctaaaagtgcatgacaacctctgcttccctctgcgaagggcctatcttttaccttatgtcttttaccttatatcttttccctttttcattttatcctttggcaagcactttgtgttggggtgatcctggtatatatatccaattggatgtacgttagcatgaactattattgttgacatcacccaaaggtgaatacgtttggaggcaacattataagcccctatatttctctgtgtctgactaaatcttcataaccacaagtattgcgtgagtgttagcaattgtagaagactatatgatagttgagtatgtgcagtttgctattcctgaaaataagatgaattgcaattgtttgatgactaagaatgaagtttgctagtgttcaataaagtttatggtctatgctttaacatgtgaattgcttgttacttgatcgtgaaaagttttatgagatgaactattgttatgacatatcatcatgctagaaaaggtgattgaaattatcattgatcaaacttgtgcacctactagcattcatacttcataaattcattctttatcatttacctactcgaggacgagcaggaattaagcttggggatgctgatacgtctccaacatatctataatttatgaagcattcatgctattttattatctgttttgaatgattacgggctttattatacacttttatattacttttgggactaacctattaaccggaggcccagcccatattgttgtttcatagcctgtttcagtatttcgaagaaaaggaatatcaaacggattccaaatgtaatgaaaccttcggcagcgtaattttttggaagaatatcacccaggagacttggagttcacgtcagaagagcctcgaggaggccaggagataggagggcgcgccccccctactggccgcgccccctatctcgtgggcccctcgagcacctcccgaccgacttctttcgcctatatagtcccacgtaccctaaaaacatccacggagaagatagatcgggagttccgccgccgcaagcctctgtagccaccaaaaacctctcgggagcctgttccggcaccctgccggaggggggatccatcaccggtggccatcttcatcatcccggtgctatccatgacgaggagggagtagttcaccctcggggctgagggtatgtaccagtagctatgtgtttgatctctctctctctctctctctctctctctctctctctctctctctctctctctcgtgttctctcaatggcacgatcttgatgtatcgcgagctttgctattatagttggatcttatgatgtttctctacctctactctcttataatggattgagtttttcctcttgaagttatcttatcggattgagtctttaaggatttgagaacacttgatgtgtgtcttgccgtgattatctgtggtgacaatgggatatcatgtgccacttgatgtatgttttggtgaccaacttgcgggttccgcccatgaacctatgcataggggttggcacacgttttcgtcttgactttctggtagaaactttggggcactctttgaagtactttgtgttggttgaatagatgaatttgagattgtgtgatgcatatcgtataatcatgcccacggatacttgatgtgacgatggagtatctaggtgacattagggttttggttgatttgtgtcttaaggtgttattctagtatgaactctatgatggattgagcggaaagaatagcttcatgttattttactacgaactcttgaatagatagaacagaaaggataactttgaggttgtttcgtaccctaccataatctcttcgttcgttctccgctgttcgtgtctttggagtgactctttgttgcatgttgagggattgttatatgatctatctatgttattattgttgagagaacttgcactagtgaaagtatgaaccttaggccttgtttcctaccattgcaataccgtttacgctcacctttatcattagttaccttgctgtttttaaaatttcagattacaaaaacctttatctactatccattttgcacttgtatcaccatctcttcgccgaactagtgcacctatacaatttattgtattgggtgtgttggggacacaagagactctttgttatttgattgcagggttgtttgagagagaccatcttcattaggtcatccacttgagggaaatttgctactgtcctacaaacctgtgcacttgcaggctcaacaacgtctaccagaagaaggttgtgttgtagacatcaggcatctccaacatggaccctcaaaccgcccgcatacgtctggaacgcgcggaccgaaccccagaagccatccaatgcgggcctgtatcggtccatcgagcgattcaaatcacgtttttcccgcaaactggaataaaatgtggtggtggtggttgtgggaggggtgatttgagggagtccggacacaaggcacatcaaactcttacacccatggaccacccaaaaggaaggaggagcccgtgcttctgtagctgcccttcctattgccacggtaaaatcctcactctcttcctccatgccgccactctctgcccaattccagcccttttctcccactctcttcctccctctcaccgttgacgcatggaactagtcgagagcataatggagttggatggtggaggtgcaagaggatcacagcatgaccctcactcggaagatcaactcagcgacgcggcaaaatcgccgcatcaaagcaaaggccgcaaaggaggaaaagctcagaaagcggcagaccggcggtgggctggtacgcagtccacagcaaccaccggcaggcaagttccttacatcgtggacataaacgtggcgtcactactcttcttgaggactgccccgccacagcttgtccaggcgcgaacggtgggcggagagcacatgggcgcccgcacgttgttcgctattatgcctatagcaagggagaaggcgtacgccaaccgggagagggagatgtttgacatcatccatggtggaggcggaggaggtggtggttatgaggacgggaaagtggtaggctcggatcccacccaatccgggaactacacccacacgcagcagggctacacccagactggcacgcagtcctacatccagactggcatgggcacacaacaacatgattgggctgccggacatgtgaaggaggaggaggtagaggaggaggaggagaacgaggacgatgattcggataattttgtcggtgatccgtagaataagggtagaccagaaagtttcaacatctgggaagatgagcttttgtgcgatgtatggtcggccactagtctcgatctgatcaataacatggagcaaaagggcacaatattttggaccaatgttcacacatggttccatgaacacaagcatttcgcaacctagtccgacgcggtcattcgcaaccgtgaatcaaagtccctcaaccattgatggtacaccatccaagaggccgtgttgaagtattgtggccacttggcgcatctcattgcatggtggcctaatggtgcgcaaatcactgagcaagtaagtttatctggccggatatgcataattttgttgatcactagccgcatacgcatagttttgttaatgattggccggatgtgcataattttgttgcaggatacgcatagttttgttggtcactaggcggatatgcatatttgttgatcactagctggatatgcatagttttttttagcgaatggatatgcatagttttgttgatcactagccggaggtgcatagttttgttggtcactggccggacgtgcatagttttgttgctggatatgcattgttttgttgatcattggccggacatgcataggtttgttgatcactagctggatatgcttagttttgtggacagatatgcataattttgttgacaatgttttattttctggccttctcgtgcgtgtatggtgttcaagaagttggacaagaaaacttcaccgtcatgcattgttgtttgaaattgaatgggaaccgaagtggaatgcatacatagccaagatcgccgcccaagccaccgatgaagaaaccggtggcccaaccgatccaacgaaagaaccacccaagaaggttagaagagggttttggggaaagaagtgggaggtggagagggtgagaagcgagaaggtgcgacggtgaagatgatggagattgttcgaggacatcttgaccaacaaggaggaggcatacgtcaagtcctcagacatcaagaaaggaaaaaggtggagagattcaaaatgttgatggagacgaccgagaagaagctagcgctcgaagagaataagctaggccaatatcgaagagaagaagggcatgctcaaggagaagaaggcaatgctcgatgaaaagaaggtgaagattgcggccgatgcggaggacgccaagatgttgtcattgaatttggggtctttgtatgccgatgcaaagatgatcatgcaagccgaccgctacaagccgttgcagcggttgaaagatgagttgaaggcggcggacaaggaggaggagaaggaggaagcggcaacaaagaggcggaggcagaggcttcatacgcggtggcgacgttagcttgggcgtggaggctcagattgccggtccggcagggcagaaaatctttttttttttttgcacgaactgtcggactgatattcttttatgatcgggcttgtaaaaactcaaacatacttgtctctttttggttatgataggccatgtgatctggcaatggtgcgatctggtggacgctactttatttgaatttgaaattgcttttactaacagacataaacagaatagcattggatggccgtctcccacatccatgttaacaaactggcctccctatccgcagacgaacgccgaagtaaatttacatgtcagccttctagatgcccttagggtcctaagaatctgagaacatgcaagagaaatgcctccctggaagcaccaggttcggcgccgccggaatagtgtcctctccattttcgctgctcacgagaggaatggcaaaagggaaggaactaggaaggttaacagtcgaatcaagtagacaatgcgagtggacgttgcgttggagatgctctgacatggacagacaaaatccacacagcagcctgccaacctgtttcttcgtcatcactttccaaagcacgtgtttgccgacctagcaagggacgacaactttgacccgacattgacccatgcatgcatgtgcgtgttgttgccgaccgaacggatcagagagagagagggagatcgctggagaggaagaacacacaaggtttttcgctgccccaacttgcgcagcttttctgttctgtattccatgtcttaagcaaattacaaagactggtctaactacctcctggcctggctggtgcgatccgcttctgtcgctccatccagcgacgggatcagtcagaggccacgaccaggaggataagaaactacggagaggcgcagctctccactatctgcatgcccatgcatgcgtttattacagaacagaaaaagagctaaatatgctgcatgcaatgagattatctgggctaacatttcacccccttaatctcactgctccactccgatcacccccagcctctgcctcatctcgatgaagcgaacacgcccgagtgccttggtcagtgcatcggcgagctggtcttgggttcccacatgatctatctccagctgcttcttctccatgcaatctcgcacaaagtgaaacttgatgtctatgtgcttgcttcgatcatggtgaactggattcttgctcagggctatggctgacttattatcgaccaagagcttgaagtgtgctggcgaggttcctgtgatatcctctagcagacgactcaaccaaagtccctgacaggtagcagctgcgatcgcaacatattctgcttcacaggaggagggagcaacgatcctttgcttctgagagctccaagtcaccagattctttccaaggaagaagacgtgcacagaagtgcttttccgatcgccagtgtctcgagcgtggtcgctgtcactgaatcccagtagttcagcagctccatggcctctcttgtagttgcacccatagtgcattgtacccttgatgtaccgcttaactactgcccagtggtgtatgcttggcttttccatgaatctgctcacaatccccactgagtgtgctatatctggccttgtgtttaccaggtagcgcaggctcccaattaccctgcgatacagtgtggcgtcaaacagatcgccttcatcttctttcttcagtttgaggcgacggtccatcggcatgtgacagctgttgcagttgctcatgtccgcaatttccaagatcttggtggcataactcctctgactcaggatgattccgttgctgctttgcttaacttctatgcccagataataactcacttgtccaagatcactcatcttaaagagttgcttcatctggtccttgaaggagattatgtctgcaatatttgttcctgtgatgatcaagtcatccacatagactcccactagcagaaatgattttgtgttgcctcttctatacactgcatgctcgagaccactcctagtgaagccaagggaggtgagggtctcatccagcttggcataccatgctcgtggcacctgatgcagtccatacaaagctttgcgaaggtgcagcacactttcctccttgccggcgaccacgtacctcggcggctgagcaacatatacctcctccgtgagacctccgttctgaaaagccgattttacgtccatgtgatggacttcccatcctgaatgagcagcaagagctagcagcagtcacaccgtctccatgcgggctacgggagcgaacacttcctcaaagtccaccccctgacgctgaacatatcccttggcgacgagacgagccttgtgcttgactacgttgccagccggatcgcgtttgacacgatacacccacttcagtccaatcaccttgtgcccatccgggagctgagcaagttcccatgtcctgttgtcgacgatggattccatctcaacgtccatgggcctcttccatggtttactggcgagcgcctcgtccacgtcgcgcggctcctcggcgctgaacaggcagcgcacgagcaaacaacgctcgaactactcgcgcaccgcctcatcttcagttttctccagtacgctcgtaaaactccgataacgaactggctgccccgtaggtacatcatggtgcgagtcgtgtgacggaggcgtgctctcgccgcctgacgagtccgtgggcgtcgccggctcggactgaaacgaggcaggcgtactcgcccccggcgtggcgacagtagtggttctcggcgtccccaaggttggtgtagagggtgtcgccgctccccgaggagtgaccggcaaggttgccgacccgctatcaacctcctggaccctgttttccgtggtgtaaaccacgatgaaagtcgccggtgcggtggtgaccgcgctcgtgcttggagtgttccaagcccatggcctgttctcctcaaaaatgacgtcgcgcgttacctggaccttcttggtggcaggatcatatgcacgatacgccttagagccttcctcataaccgacgaacaccattggtgtcgatcgatcgctgagcttggtgatgccggtgccaacgcgcttcacgtgaaccatgcacccaaacgtgcgcaggtgctgcacattgggtttacggccatgccacacctcatagggtgtgacaccctccaagcttctagttggcgcgcggttcagcaggtacatagccgttctcattgcttctgcccagaagaacaccggcatatccatgcttttgatcatgcaccgggccatctccaccaccgtctaattgcggcgttcaacaacgccgttctgctgtggcatgtacggcgcggtggtgaagtgcttgatgccgctctgctcgcagtactccttgaactctattgagttgaactcgccgccgtgatttgacctgaacgcgtgcagcctgcagttgccgtcggcctcggccgtcactctgattttcttgaagcgggagtacgcctcgtccttggatcttaggagttctaaccacatgtagcggctgtgatcatcaaccagcggctgtgatcatcagccacaagtagaaaatacttgttacctcccggcgttgttggagtgatcggcccgcacaagtccgtgtgcacgagctctaggccgcgctcggcgcggtatgccgtggcctgcgggaagggtgctcggtgttgcttttccagggcgcatccgtcacagtattcgactacccgatcaatctccggcatgccacgcacgagttgtttcatggtcatggcccggagcgcgcggaaatgaagatgccccatgcgggcgtgccacctccaggtagcatcgtcgccttgcgccatcagacatgccggtgagtcgatggtgagcacaccggtgtacaggcggttgccggagcgcttggtgcgtgccaggacgcgccgcgctggatccaggacggccatgacgccgctcgcgatggtgatgatgcagcctgcctcgtccaattgccccacggagacaatatttgtccgcaggctagggatgtagaagacgccggtaagagtgcgctgatcgccgccctggcagcggaacacaacgctgcctcgcccacggattgccacgaccgagccgtcgccaaatttcaccgtcccgtgcacagtctcgtcgagcgaagagaatacgtgtcgatcgcctgtcatatggctgcttgccctggtgtcaaagaaccacaccccgtccggcgaggggacgggcatgaccttctcctcgttgaggtaaacatgctggggcgccgcgagctgtgtgttgtccgcagcggtgaccacagccatgtaaagaccttgatcatgctcggcgtcggcttggacaagattcgcctgctcctgttttcccttctactcctcatccctgagcctggtatggcagtccttcttccagtggcccggtctgttacaatagtggcacttgcctttcttcttcgtgccggagccgctggatccgctcgcgcccgcgttcggcggcgcggctttgccaccaccctggtacttgttcttcccgggtggtttgtgtttattgttgttgccgcctgacgacgacccgccagagccgagctgcttcttgcgcgcatcccactctgcagaggtgtacatgagccacgccccagattgcgctgtgtcgtccagatcatagtgatcttcgcgcgctgataaacgcccagtgagctcttcaatcgtcatggtcttgagatcaatgagagactatcgccatcgccatctaccggtacttgcgcggcacagcgcgaacgaacttctggacaaccttgtgctccgtcaccggatcgccgtacagatcgagatcggcgacgaggccagagagccgcagcgggaaatcttcaacggactcgccctccttgaagcggagatcctcaaattcccggcgacgcacttgcgccttcgcctcgcgcgcgcgctcactgcccatgcggagagttttgttcgtctcccaggccttcttggccgagtccttcgcggccaggacacggatcatctccggcggcacgccggtgagaatgatctgcagtgcgcgccggtcgtcgtgattgtcggcgccgtcatcgatcaccgcggaccagacgcgggccacctaaagcttgactagcatgacgagggaccactccatgtagttggtgcgggtgaggaccatggatgatgtagaggtctcgctctcccgcactacttgctcgtcgctaccgctgcccgtcaggcgcgccaccggcgcagtagacagcggcgtcttcggcggcgacttcttcccgccctttcccttcttctctgagtcactgtcggacatggccgccgcggatcagacaccgccggccaccggagcagggatcgaacaccacaactctgatgccaattgttgttgccgaccgaatggatcagagagagagagggagatcgctggagaggaagaacacactaggtttttcgctgccccaacttgcgcagcttttctgttctgtattccacgtcttaagcaaattacaaagactggtctaactacctcctggcctggctgctgcgatccgcttgtgtcgctccatccagcgatgggatcagtcagaggccacgaccaggaggataacaaactacggagaggcgcagctctccactatctgcatgcgtttattacaaaacagaaaaagagctaaatatgctgcatgcaatgagattatctgggctaacagtgcgggtctacgctagtcgtcgtctcgtcaagcctgccctgtaaaaaagggaaacacttccctacatacagctgatgagaagcattcgtcagacctgtcggacgccgttgatttgtattttgatctcacggctacagatgcacttataaagatattaaccacctgatttcctggtcacgcccgcggcctccgctccacctcgtcgatgagccatctcctccggcggccacgccgataatgacccaccacctgctgaccgacgagctcgtaacttccctcgtctctgtgcttaacttcgtcaagatcgcgctgctccacttgtagtttcggtctcatgaatgaacggaggaagcatagtttgtattattctttttttccctgttcattattttaagccttagagttcttctccattcctactggatatgttcatcgaaatttgttaactctctcccatgattatgtcttggatttcaggaagcacataagaaagtagtaagatgcaacgtctttccacaaggcagtgatgccagacaatgtcttcgtctttttgcagattgtgtcactgcccgtatagatggtgcagtgcttcatgatcaccatggaaacaaattctctgtttaaccgagataaacgttcaccattgtggaaacatattccatgtagtttaaaatttatgtttttttcttttgatggaaacaaatctatgttcgtatggaaacagttctctgatatatgaaaatagtatcgtaatgattcagaagcaaaaaatatatatttatggaagcacgacatttgtactgttgtgcccaggcgacgcaaacctggtcatatgcgtaatctttgttgtatatgaaagcaaatcattattgttttggatgcaaatttctatttctttggacgcaaataccaaattctttggaagcaaattcctatttctttgaacgcaaatagccaattctttggaagcaaattcctatttctttgaatgcaaataccaaattctttggaagcaaagccctaatataatttgcttgaaactgttggtcacaatggtaaaagaaaaggtgtttgatagaattgttcgaagcattttattgttacattgcagacacttcaatggccattccaagcaaaaattcctgcaatataaacaaaataaacagtcgcgctggacaaaaatctcaccaggttgaaacaatgtagtttgatatggaagcaaatttgctaggaaatagaagcaaaacgaattgttttagtgctagcacgtgttaccatactatgtgcttccgtgccagaaaaactggcaatacccgcaaaaaaaaaaaaaaaaaaaaactggccaacagcatgcatgatgcatctgttttctttggagtagtttagtgtagatttcaaagtacgtacagatgaagcattaaggaaggggctggagctaaaatagtgtctaacgtgatttctggggagtagttgccgggaaacaaatcacaattagtacttacatctatctatctatacctatactaattacagactcttaagaaattaccacgttaatcagtaattactaattacagactcttaaaaaattaccacgttaatcagtaattaggagccgttaatctggtgggaccgaattattacggtgtagatcttccgatttatgtcatgagtctaggtcctacacggcacatacgaagcgatctaaaaaaaacgtttgatcataatcttaccacgagaagcaaactaactgaaacagattatgcataaggtgatgagtctacatcgtgcacgactcctatgaatcgatctaaaaaaaagaagcataggtattgtacttctttttttttaacattataggtattgtatttggacggtaagaaaacctgcagattatttgccgtccaaaactgtaacaaatactacacgtatctcttgctgaagaacttggtcgccctgtatccttgctgccacgctgccggccggggatgcgcgagccgatgcctctgatctagacaagtcaacgcttttttttttttagaaaaggaggaatacccccggcctctgcatctggtcgatgcatacggtcaatttattaattattagcacaaaaccttacaaagtcgtacaacagtaagaccaaagccaccatcttcgcaacctttgtcgctactcctatctaactgatgaaggggcgctgatggtctgggcctaataccaaatagaactcgcagccaaacctaacatctaagacatgaggtcccaacctggacgcctgccgggtatgggcacccaccagtccggcgtgctcctcaaccaggccacctgccgggtatgaggccgccacaaccacctaccacatatccatcttcagagttgtactgttgcaacagccttgcccggtctcgctgccgccgacgccaccacgacgccagacagcgtcgacctcctgcgcgtgtccgtcaccacacatctgacgccaagcctccgctgctccatgccgccaagagccgccgccaagaatatgtagaaagaaacaccgctccaccgaaagggaggcagcacacccccacccctcacctgcagacccttccatccgatcccaatgtccttggcgtcgcctccaggaaggttacggtgcacagggcgccgccgacgcccgatccgcatcggatcttaggctttcacccggacatgggtcggagaggagagatggtgccctcagcagcgcccccaaggagaaaagcggcgccaaaaatcggcgtcgccgctgccggccagccaaggtagccaaggtttcccccggacactgatctgctccaccagaacacagtggaggtggatccggcaagatccaaaccgaaccggggactgggaagggatgcatggaagggaagggggcaatacctccagatctggcacgcctgcggcttgccgtcctcacggccgaatcctcaggcacgccgcacgccacgctagcagggccgccgccctggatccgatggcctccgcgaagaacgaagcgccgaagaccccgccgccaccttccccggcgcccgcgcgggctttcccgacggtcgtctctggtggcggcgaggggggtggaggaggtggggggaggcggccgcgggaaaccctagactcccccaagacgccctaggggcgacgccagggacgggaccacaagtcaacgcttctgatgcagggcatggggttttgcaacaccgattttgcagtaagtacttgaagaacgaggcttctctataggaagatctgcccgcagcacgaggagagagacaactgtgacgacgctgcgtgatatggtgagttccatcggcgtgaattgttgcctggctacacaagataggatgcaacccacgtcttctccatgctttataagaaaaatcagctccatgctctgtctaatccccatgatcgaagtatatgtccatccacatgggcccgtccaaggtttcttctcgctgtgagagaaaaggcaatctaaagctgtgagattgagcccggctttggctacagcaccgagaggtggcctattgctagcaagtaattaacaccatgactgtgtacttgatttgttttcacgtaactagctaatctggtgcgatcttttccttcagaccttaactcacaacttctcatctccatggctatgcctcctaaatttttaatgctggaccgaatccatcgacatcaatttcatgttccagtactctccaaattttgaacctcctgagttcctaatttcgaccacctacatatcatggttctcttcttaacccaatacttttcaagtggattaatgcatggaagagcaattggatagccgcattcatcgtcaacctacagaagagtcctcccaaggttccaactgtcctctcgccctcctccaatttgtgcagtgctaagcattacaacaaggaggcgaggttatgaacaaaggcgttgacgagtgacatgtctgacggcagaatcacaaggcgtacatcaggtagcatcttcttctcttttttcttaagttgtaaattgacatcacaccgggtatgttcttcgtcttcttttaacttcagatgtaaatttcgtttgtagccacgtcctaatagtcatgtgcacgttgatgtttcggcctgaaaacaagacattttttaactttgaggttgctaatgtcattacgtattaccatctaactttcagactgtatattttttgtcatatgatgtaaattcagaggtatttcctttagccatggatgtttgcatttagctaaattggcatcgaattgctacaattagtcacatgtagacatgcgccatcaaagttggaaggatggaatcgatctgggtctgcaataattgagtaactttctaatacttcaagtatgatctatgggcgacgagctccagtcagtagctgggtagctccttcgttgcccatgaacctctccgtgtcatgcagattttgctccacggcgcctgccacccatgtcattttcaatgaggagttcatgcacacgcaaccatatccactactcagtccggactcccctgtacgcagctcacagagtctagcagccaagcgaccaattagccgctgactggctgcctactccatctagtatagaagaagatttggtggaaaagcagctgtaagttccctgcttttactcttcgtctttttagctatttcgttctcttactgcaatttacatggtctgtgtggtgcgatgattagtgtaaaaaacagaccttatatcagtaggttttgcaggatgcctccatcctatttagttctttgtcagctaagtaataagagtacttagtgaataatgttttaaaaacacaacgtggatgtgaaaattatttaccactgccgatctaggtttcaaagaatttaattatgaagttttagatcttcactaaatacaaaaggcacacaacagcgttgcttacctaattgttttatgtgattcacatttttttggaaatgtaggataaccccatgtgattacatagccgtggcaatttgtaccattgacttctgctgtgagtagatcagcaaatatattttcccatattatctaattaggttaggaagatacttgatttttaatcattcgttacttgcatcgcaaatttccagatggactacagtgatgtacaattaatcctcatgagatctttgtaaaaaaatcttgattgatggagctgataattaattagtttttatttgcattcctttgttaattttgctgatatttttctactcaggatttgaaaagcatgaaaattccaagcatatatttgtaagcctatttgtttctatatttgaatttccagcacctatatgtaacattttcagttaaaaatatccatttgcgggttacacaaaagattattactgtgcggatctgagatagtgactagataagaacaacacatacatttgtcttccagtgtaacatacaatatgcactaaatatagcttagataccagcaacctaggagggcatagttaaagtaatgtgttctttcttttcttactgaagttgcaaaatgttgtattttctgcgtgatattgaagggggaaaacaaagccacaagatgactttaatagaaattaacaacgggactgttgatagaaagcaaaggtaagaccaattaatttttggatgctacaagtatgaatcatatactaacacgaagtaattatttcccccgagaccatattccttaataaatatgttgctattgaactataaggacaaatgtttctgctcatgagctgactattagaattttcaatggttttagtgttcagccggtcgagtactttgacaaaaataaacgtgggactttctatagtatgtacatttatactccattatgtactcatttaaaataagtaagttatagactagcccgtgcaaatgcacgggttgccgactagtattcttagtcgggaaacccttcctatctgtagtctgaggaaaggcgatcgacagaccactagaatgccgtcgatccgttcaagattttgcttcgtatgtagaaaaaggaaaaaatcccacctccacccgcaagcagcaaatcccacccgtaatcctcccccggtctcccccgtgattccgtcgttcctaatcacctgccccgcccaaagctccagacctcttcctccacctcgctcgcctctcccctagtgagccatgcctagatccccttcttcgccgcctcgcaccgcggcttcaccatccagctcctcccttgctccggatctacttgttgtcgagcagcctggatgccccatcttcctctccaccaatgcgacccccgggcgatggtgttatgggatcatgccctcatcctcaaccacgaatcctgcttcgccaagctactcatcgattgaatcgacaccgttcggggtaacctcatcggcccaccatccttgatacagcacttgaggaaccacgacgtcctaccatcctggctttaggcggctgtggcctgtggccgtcatcccacttcgtttctgttgcatcaccagcttgccagaaagatcaactggttgcgtgagtactgagtacctaagttttgggtcccctcaacttttaatttctacaatcatagttggcctctaatgtattgtttcctaatattaccttttaacatcttggtttattccccgcttccaattaagatgaatcgtactgaaagtagcatatttgcatgcttcttgcaaatggggtttcagaattccacttcatgtgcttcttcgatttattcggatttcatccatacttcctgcgtcttatattacaaattttcttcttgtccttgttatgaccaatcagctgttgcctccgtccttttctattttcaaaatcttgtgcttccaacttagatgagtaatgatcaaatatcacttttttaggcttcttacttatatagattccaaagtacactacatacgcttctactatctggatagtttgtttctatatagctcattccctttttggtgaattagcgaagtaggtggtagaaacgttcatctccaggttgctggttatttttttattttcatttcaatgctcgatgcttctaaataagatgaatcatattgacatgacacattttcattcttccttctaggagggttaggagagttgcggatcagtgggaggatttccgtcttccctttttcctcttcgttgtctatgttcggagatgaaagggggcacacatggtcggttgcacgaatcagcctccataccatcctcatccaacctcggtcctgactctcctcatcaaggaagtatgtcaagattgcatccatactatgcttcgagctttccatggttcgtacgtatagtacttatgcatcatcggtccgtacagtttgcttaatatttaccatgtcaatccttctacactgactccaatttgcttcatacatactcaacttatgcttctatgttgtgtttagttttgatcagtctccatgcctcacacgtgcttgtaggtgtcatatgtttacttaatcaatgactaaaacatgctgcttaaatttcacatatattatgggcaagatgcaggtcacccccttccttgtcctaatttgcatgactgcgtagaaatatatttttacccccgtttaacaaaaatatgcttccactatacagaaattatgttgagattacatcaatatgatgcatccaattttcataattcatttgtatcatacttgtgcttcttcacgacgcacagtttgcttcatatgcaccatagttatgcttcttacttactatggtttacttcatgtgcttcacacttgtgcttctacattgtgttcagtttgcttcattgcattcttcatattgtttcttaggcatcatctttgtatccaaataaaactaatcatgcttccttaatttctgcaaggctaacaagagtggaagatcatgctttcccgacggtgaacatgtcgtggtcatcgatggtgggcatgtagtgtgacatgatatcgatcatctccagtgcccagtgttttgccatcgttttggaagtaaactagcaaggcaaacactcggttgtccaagttcaagggtgtcattccctcgttggtgccagcgtcgttgctctcgaccatgtaattatatattattgtttctcaatatgttactatggcagtcaacttttgcttcaaccaccgttagattatgctttagccgacattaaagtatgcttcaaacaatgtcgtgttgcctctcttggtaaattgtactgacattttggttcttttagagaattttattttttgacctatgttggtgtgcttcattgcttgtctcttctcatgggtgcttccattgtaaagatcttttgctgcaatgttttgagccatgcttgttagtttctcacacaatcaggatgatgttacaatgaatttgagtgctaaattgttgacgatgggctggacaagacacaaatgtaccaaatagtgttgctgtcatagtttttttgttgtttttgtctacagagttgtagattattgttcacattggctgaaatttgtttcaatgcttcgtgcttctctttgtgcttccaccggattttttgtgtgaagcaaatatttgtgtctcacaaacatttgtttccttagccacttttttttcaaagacacttaaaccatgataccatagatagaaaatgttgttttgtcgctcacaaaaaaatgtatcatcacaagaattagctgtttccatcacacaaggaaaacgatgtgcttctatccactgaaaagaatgtttccttggcaggaaaaacatatcaccatcgccaaaaatatatctcagaaacaaatataatgagtaatatgccaggttggttgttataattaccaaagttgtttctgaaatttgggggattaatttcgtcatgccagatttgattctcggaagcattggtttttctttaatttgagaatctcggaagcatttgatttggaagcactgattgataaattaccaaactaactaccaccaagcccatcccggaaaaaaaggcgcaaccactgggcccatggagagcattacgaggacgcaatcaattaacgctacaatccagctaattaagcaaggtgatttacttgaggatcgacggtgcacatgcatttgatctgatggcctgtgagtggtctgatggaagcaaaacatcagtagtctgatgcctagtgcttcccttcttagtccacctcacaagctaggcatttgcaggctgcagctagtgtaccaggtggtataattccatatgcccgcattgaagagaattcacatgtaagcttacattatacgttcatttgtatgccatcaccccatctccatgcacagaacaaatcttttttgctgtaaaaccaaatgatgctttgattgtttctgcttttccttaatgattaattttgcccacttttaaaagggcgcattttataaaagaaaaaaaggggctatagcacgcatgtaattagcatctgatgctgcattgcccgggaaaattctctaggctttacgctcaaaatattatcccttgcgtgattaccttatactccctccgtttcttcttagtttgcatataagatttggtcaaagtcaaactttgtaaagttcgactagctttgtacaattttttttaacattcacactatataatcaatattattagatgcatgatcaaattatttttcataacatataactttagtatcgtagatgttgatttttcttctataaagttagtcaaactttgtaaagtttgactttcactaaatcttatatgcagactaaaaagaaacggagggagtacatcctgattcattgttgtcttgtatacaagaacggtaggtatacactatatatagcaccagtaagtaactgtggatgatatctattcttttttttttttgcggggtagtgatatctaggtgctcccatgcctgattttttttctttggcaccaatcagacaatggaggccattgatgccaaataccctaagagtaaattttgcatcaattttagcctacatactggatagccttaatagatttggggttgttttcacaaaaaaaaactatattcaaatgcatcaaacacgccaaaacaaaggttgcgggattcttgcaagagcacgcctagagaggacatatcatattccccggaggtgagagcgttgaccaattggagcgggtccgattcaaagaccgggcaatgcactcccctctcagacatagctttgatggccttgacacaggctgtagctatgaatttggtaagcatttctacctgtcatggcaggccgcggttgcgtgtttacatagatgcaatggtcccatgtgatgtgtataaaattgagtttgttacaatgcatgaggatcaagaagctacaggtaatgatatgttcggttaggttttatctcaactaaaatcgagatacatgtattggagaagattgtacttaacagcccagctcaagcacacattggtaagagagtgagattgcgcctaaatttttctagacctcaagctagttaaacttttttaaagccatctacgatttgatcctttgaaggtgcaaactaagtttcaagatatttgcttaacatccttgcttttgaattgttaaaaagtagttaccaatatacaaagagtatttaccttcttgtcagaggtccacttggcaaatcataagccgacacgggaaaaatcatcattggtcgaccctattaacggatatcaaatttggaacccggaccccattgcttaatattgacctgttacaatggctatcatgtttcggatacccttgacaaaaacatttccatgacacattatttatcatcatggaagtgcatacttccatgatcaaaaagtaattattttcatggaacacatccccgacatcacatgtacgaatatctttgtcataaaaccgtcatggatgtccatgggtcataaaaaatttgacctacgatgacaaatgtgtatcatcacggatttgccttttttttaataatgacaggttgctgcgttagcctcctttcaattgacacgtgaaagtgcatagagcccacccgtatttccagactagacgcctgacactagtgtttgtcagatggtttttccggccggcatgccatcagtcactgttggaatgaaccatgagtccttgtccggcttggacaggaacaagtcacgtatagaactagattagaagtaggaaaccgattaggtcagctctactagttctatctactatatatacttatgtatccccggtacttgttaacccagatggcaaagcaataaagcaacaggaccgatacagccctgtagccataacatcgccgcgtgtgtacaggagttcccgacgaatagccgatcgatcaaacatcaagctagctagccaccgtataatcggccggcttgacaaacgggagtgctctcaatggaaagaactcgtctatgagcgacttacaaggggcttgtgctaacaattggtatcagagctttggtgtattgacgtgattctcggaaagcaattgaaggatcatgtcaaacataggcaaggagatcgtgacggcgtcagcgggagcaccgatgccgatggtgggggtgtcgcaattccaccgtctggatccagaggactacgcactatgggcgatgaacatggaggtcacgatggagggagccgagctttgggaagccgtcaaccccggcggcgccgagtacgcgaagggcgcggcgaagtatcggacggatcgtcgggcgttaatgacgatctactccgctatgccgaaggatgtgctgcaacacctcgtcggaaagaactcggcaaaggaggcatgggagaccattaagatcctgcaccagggtcatgaccgtgtcaaggaagcacaccttcagtccctgataagtcacaaaaattataaactttctgttagtgccattacttttcaaatgtgaatagttaaaatttgaattctttgaaatttgtgtgaattacaagtttatgattaactttactataaaaatagttttttcccagtttttttttgttttttgcattatttattttcttttgttttttaattctttttgcttttaggtcagcaaaattataaactttctgttagtgtcattagttttagaaaaattattttgtttttttgttttgtttgttgctttatttattttattttgtttctacttacaacaaaatgcttattattgctatttttatttattttattaaagtttatttttaattatttttcttttaagtcacaaaaattataaactttctgttagtgccattagttttcaaatttgaatagttaaaatttaaattctttgaaatttgtgtgaatcacaagtttgtgattaactttactaaaaaatgaacataaatgcgcctatagagaaaattcaacctaaattcataataaatttttatgaatttaagagaaattcaccatgaatttaggtcaaagttccctgtataggggcatctatttttactttgagaggagctcaacaaggcagagagggacgggcttataaaccggtgtgagcacccttcggttggcgacgtgggactaaactctgagcgcaacgagaaccaaccctttagtcccagtttgtggaacaaaccgggactaatggtcatggggcaggggcgaggcgcattggtcccggttcgtgcatggaaccgggaccaaaaggtccagacgaaacgggatcaatggcccacgtggctgccctcttgagagtgttcttggtgagaacattgttgacaaggagcaaaccgggattaatggtattacgagggccgaaccataagacattaaagcagttcaaatgaactctgtgaaagttgaaagttggcatggtatcataattttatccacatagcatgtgcatgtacaaaacgaacaatggtatcatactcgtctgttacaaagttggcatggtatcatcataatagttgcgggaggaagtcttcactttttcttcacttgtgccatttgcttattgcaccgtaaccatggataatcttcatcgtttatcaggatgcttgggtcagccttgactttgaagggacgaatttcatgaaacttttcataatctcagacatgtctgtcttgccctccactcccacgatgtccctttttcctgaaagaactatgtggcgctttggctcatcgtatgatgtattcgcttccttatcttttctttttcttggtctgatagacatgtccttcacatagataacctgtgccaaatcattggctaggacgaacggttcgtcagtgtacccaagatttttcagatccactgttgtcattccgtactgtgggtctacctgtaccccgccttctgacagattgacccatttgcactaaaacaaagggaccttaaaatcatgtccgtagtcaagttcccatatgtccactatgtaaccataatatgtgtcatttctcctctcggttgttgatcaaagcggacaccgctgttttggttggtgctcttttgatcttggtcaatcgtgtaaaatgtatctcgtatccttattaaatcaatacagtcaaagatggtcccctggacaacaagtacagctcatcacaaaacagtgttgtcacctctgagacgtgtttcgaaccaactgctgaaagtcctgatgtgttcacatataatccagtcgtcgcactgctccgggtgtttggagcgcagactgttcttatgttcatcgacatacggggtcaccgaggtagagttctgtagaactgtgtagtgtgcttgagaccaagaatatctatccctgcatattattgagtcccttccaagcgtgccttttccaatcagtctcccctcataccgcgatttagggagacctatcttcttaaggctaggaatgaagtcaacgctaaacccgatgacatcctctgtttgatggcccatggagatgcttccttctggcctagcgcggctatggtcatcaacccgtgcttctgcacgggcttgatattgttccgccttaaatttttgtgtaatgacatgctaattaaataatgcaattttaaaattagtgtgaatgacatgtacgaataaacactacataatttatattctggtagatttaatgtacatgttaatttttgtagtagaatagcgatcgctataatttagaaagatggaattaatacaaacttttaggccctatatattttaaatggtgcccaatttgtatatattagaggattccttcacaataatatttgcaactgcaatgtatttttgtagaaaatattaacatttttggacaaatataaatgttgttcaaatagatgaggacaaatacaaagaatcctaacatgtttctattgattgagcaattcctacccaaaaaaatacatcgccattttcttgaatttcccctaaaacagtttgcagcaatcattaatttttcattgcttaacatatttgtgtaacaataaggataatttgaacaggctgagtgatgactacttctgtgagtatttcattgccctctcaccctcaggtatgccttcctttaccttaatccatcgtggttctattgtattttagcgatacttgatgttgcatggttggaataggttgagtaggcagactaaaatgaaacatgtatatacttccaaatttggtaacattatacacacatcgacattgataccacaactcactaaattaagatgttgctgctttcatgggcttgcttttttttctccaaagatgatgcatgtataaatataaatatattacttaaactaaaattatcagaagaagtattgagtgcttgcggcatgttattctagcgacgactacttaggtggatatatgttccttcaggtgaaagattcaattatctatgatactattggttattggttaatcatgacggtgtaaatataacagtaccacctgatacatgtggtaagagatcaaaaatattttaaaaatctgtacaaataatactactatgatgctacttctgtcatttatataatctacaatacgtcttcgccctttgggaagtgctccacctttaacttaaaaaatatttacttcaaaatgtgtttatcttgtatcaaattaaactatagactatatcgtaatacatggaaaaattatccactaaaattaaaatggacaatgttatcaaaatatcccgatttaaaataccaattcaaattatatgtttatgttcatatatgattttactacgggggaaatttgatgtaatttttcttagttattatatcttacaatctggtgatttcacgctttaatttttttagatctatttcgcgcattaaattaatacacaatcatgaattgactatttttttggggaatcaggcattgactctatcacgtaccgtgatgcttgagcaggatttatttgcacgtatccgcgaaaagaggaatttttttacctgccttctcatttgtttggagagaatatgcatgtgtttttttcatggcgattagttcatggatttttttattgttggtggtcttttttttgatgggacgtgctaagacacgtgtattttgtactgattggaacttttttttaacatgtactggttcgaacttgtacgtgctggatgagaactctttgtttttttctttttttttcatcgaactctttgatgtacatgttgcttttcttttgaagtaacctgttgctttatcaattgtataggtaagtgcttaaacgcttgaagactttttatgggacgtgttctttttctttaggcaggttgaaggcacgtatattttgtacagattggacttggaacttgaacgtgttggatgcaaagtttttttatgtacgtgttgctttattcattatacatgtgtgcacgggctagcaatttattaaaatataaaaaaactcccattataggaggacccccttatatcctttttgtctgaaccacgttccaatccaatggcagcacacgttgccctttttttctgtcggcccttgtattctttttgtacatgcctttgtgtagttgagccatttttctctaaacgtatgcgcagcagaaatagtactgtttattctatctttttttgcgggtgagtactgtttattctatcacgttggacttaaaaaaaaggtttttatggattggacttaaatcacgtttgtggtatgacttgtatcatagatggactctcaaacatgcatgcagatacctcctaaagcgctcgttatggatttttttttacttaccatgttggacttaaatcacgtatgacttgtattgggttttttttttttgcggggaaagatcgtagaatacatggactccctttccttagcgcgcagacacatgctaaagcgtttattatggacttgctttttttaacttatcacattgggccacatattgggtttttttttttgcggggaaagatcgtagaatacatggactccctttccttagcgcgcagacacatgctaaagcgtttattatggacttgctttttttaacttatcacattgggccacatattaagttcagcatatccgcccagggaaaaaaatcttcagttaccaacgtgggcatccttttttcaaggaaccgatggatgccttcctcagttaccaatatgcatatcattttttcattggagaatattttattaatggagtttgtaggctaatcaaacggatctataatttctttcctttttttcgctagagtttttatggaaggaggcgatctttttcaaggtaacgatggatgcttccttttttttttgtttcattcacgaatgttgaacgtgtcagaagtcttgtttatgggacaatttgtgttacgtaagttttctttttatctctgccgttaattaactaatccaacggtttaattaatttg

SEQ ID NO: 25 - DNA, 34868 bp, Artificial Sequence
  Scaffold 1889560
ggagagtggcagcgatgtcggggcagagggcagtgacgacggcggcggcgacggcgaggtggagcagcccgacggcgtcggcgatgacgcagtggagcagcccgacggcgtcggcgatgacgcagtggagcagcctgacggcgtccgggcagggctcggcggcgacgacgagttggagcagcctgacggcctcggggcagggatcggcggcgacggcgacgaggagcaaagtgggggcgtcggtgcggagaagaagtgatttttgcagaaactgctaagtggtttcttatatacacaaagctttggttccggttcgtggcacaaaccggtaccaatgccccctttagtaccgattggtgccaccaaccgtgaccaaaggtcagttttcggcaggccaaagggcgggaagcggaggcctttggtcccggttggtggcaccaactggtactaaagggtgggaattggtaccggttggtgccacaaaccggtaccaatgcgtacctttagtttcggttggtgccatgaagcgggaccaaatgccctgtgttgcccgcgtcgcggccgaaagtttagtcctacctcgctagctgagagagctcgggagtggtttataagcgttgctgcggcaaccgtctcaagctcctctcaactgcaggcttgcgggcctaatttttcacgatgtgcttgtgggcctacagggccttctgcgggcctaaatcctggcccatggttgggtttctagtcgtattcaggccgtgatggcccagtaggtggcacttttttattttttgttgctttattttttaatttggtttctacttacaacaaaaaaattacggttgctatttttctttattgtatttaagtttatttattttacttttataaatttattttatttctacttctttattttattaaagtttattttattttgtttctacttatttattgtattaatttttagtttattttattttttttctacttatttattaaagtttattttttttctttctgcttttcatgttttgaacagaaaatactttgataatttcagtggcatgaattttatataattttagtttaaaaaatactagagatttataaaagctttttagttcattccttttgctattagagttttataaagggatttcagttacaaagggatttcatttttttttaacttatttgaagtccagaatttttctgtgttcaaaatacaccattcaaagccacattatcaattttcaaccctttctgacttcatttgttatttttcatgcatttactgattattttgagctataagaccttgaaattgaaaagcatttcaaatgaactctgaaaaggttaaaatttggcatggtatcattatttcacccacataacatgtgcaagaacgtagagaggaatacggcaaaaactggatgcacttcatgtacaaaacgaacaatctcttttgaagtatcagggtttcatacggaaactcgtctattacaaagggatttcattttttttgaacttgtttgatgtccagagtttttctgtgtttaaaatgcatcattcaaagccgcatcatcaattttcaaccctttctgacttcatttgttatttttcatgcatttactgattatttagagctataagaccctgaaattgaaaagcatttcaaatgaactctgaaaaggttaaaagttggcatggtatcatcatttcacccacatagcatgtgcaagaaagtagagaggattacggcaaaaactggatgcacttcgtgtacaaaacggacaatctctttcgaagtatcaagtttcatatggagactcgtctgttacaaagggatttcaatttttttgaacttatttgaagtccagagtttttctgtgttcaaaatgcaccattcaaagccacatcatcaattttcaaccctttctgacttcatttgttatttttcatgcatttactgattattttgagctataagacactgaaattgaaggcaacatatagctctcatgaatagataagtgaccaaattaataaaagttcatcatcacattaaaaccaaagtacatacatagttctcattgaacaacatatatatagctctccagagcatctaattaaaccatacattgaaattatgtaaaacatttcaatgcaacaacaaatgcgatcataatcgcaaccaaggtaacaattgatccaactgcataatgataccaagcctcggtatgaatggcatattttctaatctttctaatcttcaaacgcattgcatccatcttgatcttgtgatcatccacgacatccgcaacatgcaactccaatatcatcttctcctcctcaatttttttttatttttttcttcaagtaattgttcccttcttcaactaaatttaacctctcggcaatagggtcggtgggaatttccggttcaaccacctcctagataaataaaatctatatcacgttggtcggcataattgtcataaacaataaatgaaccaaatagttataaaagataatatataccacacccgaatcatagacaggacgagggccgacgggggcggataccaaaaccatggtactatataataagaaggaataataaaagtaagaaaattagacaagtatctatttgaagtaagaattttttttttctttcagaaagaagataagaacaagaggctcaccacggtggtgccggcgacgagatcggcgcgggcgatcgacgacggtgaagacggggacgggacgtgacggaccgctaaacctagacaaatctcgggggaaatggagctcggaagtcgagtttcgagaggagaaagagtaactagtgtggctcagacatttcatcgaacaccttatgtgcataggaggtgagctagagcacccaaatgccctcccctcaccgtccagaaaaaacatagcactctggagtgctctgccgaggagatggggtatatataggcagctcatttgtcccggttcgtggctggaaccgggaccaatggttgtgggccaggagcgaggcccattggtcccggttcatgcctagaaccggtacaaatcggtcaccatgaaccgggaccaacggggacgaatgcccccatgggtcccggttcgtgactgaaccgggactaatgggcttgccctgcccgaaccaaagccctgttttctactagtgtgaagcaagggggacgtttcgttctcaaaaaaatctcctgggaaatgaaccaagcgagtgatctgcttgctcattttgatcgttagaggaacgaacggtagtttggttaggatcagagcatgatgaaatcttagacctcatcctatgggattgtaatgtgataattatttaatcaatacaatccccttacctcacaaaaaaaagatggtcattgatttttttttctcctgttgcaatgcagggacatgtttacatgtaatagattatatatatttttttgcaagattacatgtaataggttagccgtttttgtttccacccctaaaccacggaccctcttttcctagagggtaagagcatctattgttgcaatgtacaaatattatccctcaagcgcccgcagatgcgcccggtcaatgttcagatgcgtccattttgatccctcacatttgcttgcatctatccacacacactactttcacctctcgcttttttcagacatttcaacaagcatctggtgggcggaaccagcagagcacgatgcgggcaaaggaggggttgaaaaaggtcattgccgatgaaacgcacaacctgtgcagcagcgacggaaagcacctgcggctgcgcacgtacgcgctgcaaccagcatgcaagccacgcacgcactactcaaggcacacacgcaagccatgcacgtctgtccgcgcgctcggcggccacgcccacagcccgccggcctgcacgcctgcccacgccctgtcctgcccgtgcgccctgcagcaaagcacgcggcgccccgtgcgctcggcggctgaatagtggcccagcgctgcacaatggccaccgctcatggcgggagctccgcctctagtgcggcacgggcgcgggagggcttcagccccagcacgacgtgctccagtgatatgttcattttgtattatgttttcatacggttataaataatgtttttaatcattataacattttgtgaagaaattctaatgtgttttttctcttaatttgcaagatttacatggagagggagattgccggcaactgaaattctggacctgtaaaagctatatcagacatacctattttgcacaactccaaatgagctaaaattttacggagaacttatgtggaatatataagaattactggggcaaagaagtaccaaagaggaccctccaactgccaacaaggcacctaggtgcgaccaccatcatgggtgcacctaggtaccttgtggggcccctggcaggcctccggcgcccatcttctgctatatgaagggttttaacctagaaaaatagagagagacctttcgggccaaagcgccgccttctcgagacggaacctaggcaggagcgcttttgctcttcggcggagcgattccgccgggggtacttccctccgggagggggaaatcgaagtcatcgtcatcaccaacgatcatctcatcgtgtaaagaccaatcttcatcaacatcttcaccagcaccatctcatctcaaaccctagtgcatctcttatattcaatatttatctcaaaacctcatattggtacatgtggattgctagtagtgttgattacatttatgcagttgatgctagttggtttgtttggtggaagattatatgttcagatccttgatgctattcaatgcccctcttgtcttgaacatgaacatgatttgtgagtagttatttttgttcttgaggacatgggagaagtcttgttagaagtaatcacgcgaatctgatattcgttcgatattttgatgatatgtatgttgttgcttcctttagtggtgttatgtgaacatggactacatgacacttcaccatacttgggcctaagggcattatggagtagtaattaaatgatgcgttgctagagtgacagaagcttaaacccttgtttatgtgttattccataagggactgatttggatccatatgtccatgctatggttagatttattgtaattcttctttcgtagttgcggatgcttgcgagaggggtcaaccataagtgggaggcttgttcaagtaagaatagcacacaagcaccggtctacccacgtatcaaattatcaaagtagcgaacgcgaatcaaataaacacgataaaaataactagatgaaattcacatgtgtcctcgacaacgctttgcatattataagtgaactttccaacctgtcatttgttataaaaaatattgggctaccttgctgcaccttggttactattggtacttgttgctcgttacaaattaccttgctaccaaactatctctaaccgataattttagtgcttgcagaaaataccttactgaaaaccgcttgtaattttctttctgctcctcgttgggttcgacgctcttaattatcgaaaggactacgattgatcccctatacttgcgggtcatcatccagcgcggtgttggcgtgctccagccccagaacggcgtggtgcaggcgtgctcccgcgcggcaccgtcgtgttctagccccagcaaggcacggcgcaggcgagctccggcatcggcccaggcatgcttaagccccatcgcaacgtggcgagggcgagctccggcatcgtcccgggcgttctcaagccgcagcacgatgcggcgagggcgagctccagcaccggcgtgattgggctccagccccaacacgggcatgctccagcgtggcaccgcgcgggattgctccagccccagcatggcacggtgcaggcgtgctccggcatcggtgtcggtgtcaaaacaggccgatctcgagtagggggtcccgaaatgtgcgtatgaggatagaaggtaacaagggacaaaggggacacgatgtttaccgaggttcgggccctcttaatggacgtaaaatcctacatcctgcttgattgtctttgatgagtataggggttataagagttgatctacctcgagatcgtaatggctaaaccctagctatctagcctatgtgaatccggatagcctctacggactaaaccccccggtttatataaacactgaaggggcctagggttgtatagagtcggtttgtggaggaaggaaattacatatccggacaccaatcttgccatccacgcataggggagtcctacccggacacgggggaaagtcttccgctttatatcttcacggcccatcagtccggcccacaccaaatagcccggacatcttaggaccccttaatccaggactccctcagtagcccctgaaccagtcttcaatgacgatatgttcggcacgtggattgtcttcggcattgcaaggcgggttcctgctcctgagtatttcaaagcaatcttcaaaagaactatacccggctgtgtataattgtggcaacccttggtcatgaaggtaagatatcaaacaaaacagtgtcttcccactgacaacttttttcggcgaaacgtcacgtctggccttttaacatttcgaaccgtttttacgcctcttgcttcgcgtttcgaggcacagcctccattgacacgtcttgtcaaaacagagatcgtgtccgccctttatcgggtcctcatcaatacgagtttgggtaatccaaccgtgacattcgcacgaccccttgggaacaggcgagttttaaggcttgaggggggcgtttgatattcactgcctatataagagggtaaagatttctctttttccccatgccttcttccttctcctaccttcccatcttcaatatccagcgctcaaacttcaatctctcccaccgccaacagcctccccagccatgtcaggatctggttcaatgggcaagtgggaggcatcctccatcaccgggaaggaagtcaaggagctctggggggtgggatatctgtccgcggacatcgcgcacaggctccctgccaaggatcaagtcattcccactccggagcccgacgaaagggtcgtattcatcccccacttccttcgtgggctaggttttcccctccacccctttgtcccgggaattatgctctactaggggctagatttccatgatctggccccaaattcttttctccacatctcgacgttcatcgttgtgtgcgaggcgctactccgcattaccccacacttcaacctatggctaaaggtcttaaatctgaagccgaaggtggtcgacgggcagcatgcagactacggcggcgccatggtgagcaagcttcccaacgccatttggcctaagggggccttcgtggagactgtcaaggtgtggcagctggagtggttctatatcaccgaaccccgcgacggcaagtgggcggccactcctgatttcagatccgaaccccctatgcggctcacctcatggaccactaaggttctggagtggggatccatgacacaagtgttgatgctgcaaaagtgcatcacaaacatgataggcaagaacaccagtctcactaacgtgatttaggtgatgctcttccgccggattcttccaggctaactccggccctctcacatgtgggagttcaatccggaagatccacggaccctgaagcacttctttggcacaacgcacgaagacgtctggaagctattgttcaaggcccaaaaagcttggtcgaagaagaccgaagatatcggtctcgacagcgagaatccggccacaccggtaagtatgattttcccaaatatatattcagtcataagttttttaaacataatgaattttctgtcccttgtatagggctggatagcaaaggcagagcggattaagtgtccggccccgctgcctgaagacccggccataccccagctgacgaagatgctggtcccggtgccctatcaggcgccgaagaagaagaccaagaagaagaagggcaaggaggccaagggaggcctctaccacaagggtccttcagacgcagtgtccggagagaccgaagccccttcctcccatgagggagatgacgaagaagaggaggaggaagtggaaagcgactcccctcttagggggatcaagaagaagagggctgcatccacaaacccggaggaggaggcgcctaagtggggaaagatggacctctcggatggtctagattcggaagccgaacccatcccaaagagactccccagggtgaagcccctggccagatcgtaagtatcgaaggatttattatatctcttcggttctctatgttttgtataatataacatattacattgtgtgtctttcacccctgctcgcgacctccccaacccttcactatctaaggggagttctctgccaccagagatggcagagagcgagatgcccccgcgagctctttcgccaaccatcgcggatgacaccgaggtgttgccccgaaagacctctcctggccgcggaggggcgagcgaggctgccgagaaggcgcccgagggtgatacatcggctgccgaagacgtgacccccatggcgaccgacggcgagggccctgatcaatccggcccccagcctgacatcattccggagatccaagtggctccagaatcgggcgagcagccccctttgaaggagggaggatcatcagccccgacggcgacctccactaatccgaggtgccgaatactctggtggaagcactacgacgtgcttccatcatggaggagcaccgcaccctgatgggtgtggtggtagagaaggttcaatctgccaagagcaggctgaacgaagccttcaccagcctactgacaggcttcgatgtatgcgacgtaattctctagatgcttttttatactaggaaaatgtacctgtatatagatagtagcccctaagactctgtctggtttaaaaaagccggacagaggatcacatagtattcagaagaggtgacgtacttttctattctataacaggcttccctgttggcggcaacagtccatgccgccaaagtctctgagcttaatcggaaactgaagctggccgatgacgaaatcgaccgtattaataagcggttcgatgagacgcaatgtatgcatgtactttagggagttttatcatatatctgaattgatatgcaaattcaaagtttaacacatgtactgctgggactatgagtgcagttggagcagccgaggtcgagaccctcaagagcacccttgcccaagccaaggaggaggcaaaggagaataaagcagccgtgaaaaagcggctgcggaattaaagaccgaacaagtcgcccgccgccagcacgaagagagggtggccgaagtggagcaagagctaaaggacgccatcggcaggtgcgaggccttggaggagaagactatggcccaagcggccgaactctccaaggccctccaggaagcaaaagaggcactgaccgagtcccggggtgctcgtgaagagatatggcaggccgaacagatagcggctggtaagccctttcttttgcagagtatatctgggggtaaaagatatgccttgctcactcgactgtggagttctccagacgcatttgcggatcttccgaggagttctgtcgatgccgcacagttcttccgagcccaagagggggactcgacagagaagctgttctggtcacagttcctagcgccagagcacccgacactgttgaacaaccatatgaagcaactatcggagctgcatagggtgtccggcttggccatgaagtacatcatagtccggctttggccagccgaacccattccaagcagctacttctgcttggtgaggcgactcatcgatgcgtcgccccgagttgaagttgtgaagcgctcggcgtgcatagagggtgcgctgtggccttggcccttgtcaagatgcactgggcgaagatgaaggctaccgacgtggcaaccgcaggcccgcccgaaggcaaggaccaccgcaagccggagagatactttgaagatgtcctagcgggtgcccaaatagtagagggtcaatgctcgattgtatcagggctgttaaaactttgttttatgaaccaaggcttgtaatatatttatgcctttatctggaattattttcctcctgtgcggccgttttaattctgaaattttgctagtcgttggcttcagccccacgtagatgctacgagggtgttcggtatagtgcgtgatcacacttgacccaacgtcttgatccgtaaaggaggtgtctgcgcagcgaactaggcaatcagactatgcggctttattactttcacttaggcataggagtttgacagtggggctaagtactagcccatgatgcgtatgcggccatccgaactaggatgcctttatcgcatgattgggcgaagaccagcccttcgcataacacggagtaaatcacgaaagacttgtagtaagtcgccgaatagccgatcagctctcgccatatcagtcagttttcggctttctctactaaggtgtttgaccggatgaacgagaaacacaatcgcagtagttctccctttactaccttatccaacctagcggaacataagttggtaaaaacaggagccgggcaacccaactatggaccaaagacatgattcggagctgatgcatataatgcaatgttcgggacgccgaagtataccctagaggtgttcggacttttgaaaatatacatttccgaataaagccccgggcatttaggccgggccaaagcatatgtggcaatctgaagcacggagggaatacaggtggtaaaatagaccaataccgaacaggggttggcaatcaactgttttctttatactctgattaatacgtcaagacgtgctattattacagataatgccgtaaacatcaaggctattttacatgccaagaatttgtacacaaggggaagctatatacagggcctaaagagaagaggtagtcttgaacatcccattgatgccctgccgcacgtctgcgccgtttctccttggtaaaaaatcctttgagaggaccaatcgacggtcgtctgtaaaaaaaggggcctggaaaagagcccttgcacgaccgtagggtagctaggttttaatgaacctgagagagaaaaagggaagggaaaaaaggttaaggtccaaatagggtcaagccgcactatagaccttgtccgcagtgtgcctccatctgcccagggtattttaagtgcgtaattatgcacacgcggtacatatgccgcggttttatggggaaatcggcggaggcgaaactactagtccagctctgggtctatcgagttgtcgttatgcagagtaggccggactcgcttagcagtgtccggggtcttcatgaccgatgaagtgtttggcttgatgaggcgctctatacctcggctgcaagggtcgcggtatgctcctcagtatggagggagcgctccatgtttccattgactgtgataatgtcatgcggtccaggcattttgagctttaaatatgcatagtgcaggactgcattaaagcgggcgaaggcagttcgtccaagcagcgcgtgataaccgctgcgaaaggggacaatgtcaaagatcaagtcttcgcttcggaagttattcagtgatgttagttagcccgtgcagcgggcctctaatgttagttagcccgtgcagcgggcctctacgccgggtattactcctttaaaggtgatgttactaggcttgattcttgaagggtcaatatccattttactgacagtgtcttggtaaatcaagttaagactactgccgtcgtccataaggactcgagtgagatggtatccatgaatgattgggtcgagtaccagggccgccgaacctccgtgatggatactggttgggtggtccctgcgatcgaaggtgatcgtacaggccgaccatgggttgaatttaggggcgacaggctctacgacatagacgccccttatgaaggaaatatgccctagaggcaataataaagttattatttatttcctcactagtagactgcccatgcgttgccacgggcatttaaaaaaattaccagttgcatatataagcataagcacttaaaatttcacatgtatagaaaaaatacccacaacaattcttgcacgcaactgtatgtggcagtatcactaaagtggccatcctgacctcctaggctatggggcgaggagttagcagcatcaactccaaataagatgtcagcaaaatcattatggtcatcgtccttgatcgatgataacattgactcagtggtcactcctcctgtgtgccttcttccccatggttggactttctcaaatagcttgatcttcttcctccaatctaacaatgatgcatgttggcacgcttccggccgactggacatatatttaacccgtgcgagacatacctggggtcttgaagggcatccatggcgctcgtgtcaatgaagaagaggaggttggccttgtcatagtggtcgttggcattgaatcagtcgatgcgctcgaacccactgtggtgatgacacatacgtagcaggcgtgatctccaccacagccgagcatataacacatcccttctcgagagtcacctagttgtgcacatagtgatcggaggaatctaaaccatgccagtaatagcacactaccgtccatcgcctcaaacattgccgccacaaggctgaagcatagtgccgccaccgatagctccagttggagcgcacccaaccgattaacctccttcctcccccacaacatagtacccactgccgtcatgctctcagttacaaagcgatgatgcaatcattgtccctgttgtctcttcctcctccaattccgctaacaccttcagttcccccggcctcgtccccatggacggcggcgcagagtaaatctccgaagaggcagttgttgccttctccgccagcactttaccttcactctggatagcatcaatgggtgagggaggtcggcgcccatgagctcatctttctgtagggcctcgcgagcgtgtccccatcctcctctgcgacctccacacctgcctcccgcaccatgctcttcatccctagccatgcccaatcttgatcaggatgtatgacatacactgtctatgtaaacatctaacacgcaccttccatgcagacataataattatgctattcttctcctgccccaaagttgcagaagtggagtaagtgagtgctcgtgtttccgatccccgctgatctagccaaggatggcccgaaggagatggaggacagatgcaaccgctgggtggttgagggagagggaggtgccgctgacaatggcggtcttctaggtttacgccatgatggaggggttgctctctcatgtgggggagaggtgagagagagaggtgaccgactaacatgtaaaaaaaaccatggatgtccttggacatcaggttgtgccaaatatcacatccataagaactctaaattaaacctagacttgaaataatattgacagtacaccaaactgcacttgagaattccaaactggagatttatatctagcatatcatatgtcatgtatctgttctattccatattccaaaatgcaggaacacgctggaactctgcagcacacgacgccatgtatatgttctattaggctccattgccattttctctttacatggccttccgttcaccaataaataaactgtgctcaaaggaactcaattccttttaattcacagtaaagcttgcgatactgagaaaaaaagcaagcaagcaagcagcgaccttaatttattattagtaggacctcaatctggcgcttacaagctttcatactacgacaaaacaattcagcgagcatgttgtaggcacaaaagcaagcaaacggccagcttaattgaacagtaggaccttgatcgcttagacttgttttattgcagctggaaggcacaagaccaattacctacaggctgcaggtctgttgttgctgacacatttacagctctcttcaacatcatttacagatttgcagctcgcgacattgtcctcatttacaaagttctctcttgaacatcagaaacattgtctgcaaaagttcatcatgagcttctttaactttagcaagtctattgaagcttgaccatggatgcctcattccgcatatgttccgggcttccggcatgaccaccaatacccctagatggacaactaagctacacaaaaagagcatatgaataagagattaccaagtgtgttctcgctcgactcgaaaacatatcaatcaatttttgttcaaagtaggtataccctctttattgtaaaaaaaaggggcagacaccttcatgtctaataaaaagttctatagcaaatcaatcgaaccaatcaggcttctcttagcatgattatatgcatgatagtatattccaaattggaactaaaaccgacttcaatatacacaagtgttcagtaaactacatctttgccgaattactcaatatacacaaggattgagagatcatcatgcaccaattggtcagacttacaccagaatgagctatacaaatgttgtgatgaatgtgctattagtgatacctggtaggaggcatcattagtcgaaagacatgaaagtgtcacatgtatactaacagatatggtgtacatttccttgtttgaatattcctgctccactctaaatatgcttgaatgaattatgcggtaagctactaaaggaaaacaataattatctccttgggcttactctccttgagccattgatttctcatttggtcaaaaagcatcttgatctaatcccacttccctaagcacatataacaattctggtctatttttactctagcccatttatgaactacaccaaagatgtggaatagaacctttagtctgccaatccatgaatgatgtgtgtagaaagggtggtgcactggctttgtgcaaaaaactttcgttcacaatttactaaaatctaaatgagtaaatcaaatcatgtaccatagattctttagtttttgaaacttcctatacaaaattagattgatggatatcataattcagtatacttctatggattgcagaccacagagttgctaccttataaacagagtatcataaccacaaaagtatatgaggaggaatttaaagaatacataattgtttattgttcatcggcgtataaaggatttgcgtgtatcaatagaaactgtcgtgcatgtaaacatggcagggaggttggactccgtccaaaaaagttcatctaaaaaatggagagaagacttttaagccatggacactcataggtgtatgtggcagtatagctaagtgtagctaagtgtagctaagtttccgtgcgttcaagaatagatatttcagaaagtctataaaacatgtgtgctagactggaataacgaattgaaattgtagtcgtcaagactaagctgcaatgatttttcttctgaagttgtctacaaccttttgtatcacagaacaaaacctaatggactcgctcatcattggttttataagagaaaaaatgtacttcagatagtgccacactgttgcacagagttatctaaatgcggtatatcagctctgctagatctctgtaggaaatataccatggaagttctataattatattatgacatctctaagttgttcaacagtataattaaaatcaaaattaacaaacgagtcgttgaacaatctcaatgtaacaatcacaatgtagcaggttcaattaagccactccttacctcgccatgaagtagtcatgttttcctttcctctttgaagtgcctgagttgcagcctcgattctaccgcatgggccgttgttgaactgaatagtcagttagcaagtaaagaaaccttagatgcaccgccttagtagaagaacagcaagtcatcatctagaaaggaatgacaggttaacatctaaataatggactgacatgaacatcgagctctagtcaggttaacaaaatcacaaacttttgtgtagatttcatagcaattatgagctcagaacttccatgggttcaaccagtaccaccggcgcacctgcaccctcgcacaaactctccttctaccccctataaaatctgtaaaagaacaaatactaacattagaacatgaaaatgcagaaacttacaagactcacaagaaatagcttacttactacctattgcaaaatcgcttcccgaccctagtgcaagagaaacgccccagccacacggccccatgttcctccttgctgccctcctcttctctgctcaaagtaattacttttcattggtacaatttagagttggggggaaataagcattactcaaagtgattctttagggaactccaaagagatgaaaatcagtgcaagaagatgcatagtcctaaatcaaactataaattatgttgatgtttattgatcaaaccttaccatcaatccagctattgcaatccaggtacagtatagatcctacaccgcccacaatttccttcgcaaccacaaaatgcagtccaaaaattctcaccaagacacgcacagcttgatttagacctcaccggctcatgcatcgacgaggcggcgtgctccatctcgtgtagacatcacattatgagatgctaagagttagtccagtcagagtttggagtatcacgtctccagtcagagtttggagtatcacgtcactcgtgtgctccacctacttgctcctcaaaaaaacactgtacacaaagattgtaagaaccacatggtattgatttgtccacgttcaaaggacttctaccaccagatccaaacttctcgcttcacacattaggctacactgcagaatttgaaaagtaactggaataaattgggcatttatttatgctaatttactcgcaagatggatggacgcagttgttcacgtacctgatccagcagccggcagcttccgcggagctgataatttgcgttttgaggtgccatgtgacgtcaacggcggaggggtcgtggccgtacctgccgtcgatggcgaaacggaggtttgggctgacagagcccaagaaatcgcggaagaaggccacaaccaggtcctaccctatcatgaatcgcgctgccggggaaaacgcaaattatcagctcctcttacatgcagtacctcggcttagtacgctcccgccgccggcctccacagcgcgttccgccgaccgccagtgcccgcccctggcacccatcaccccattgtcttttcgctgcagctgcatgagcacgactcagggtggacggggcgagcggtcttttgggcccgctcgtggaccgaagtggaccggaccgaaatagcccggaccgacaaaaaaactgaccggtccggtccgtgaaaaagggaccgaaaattgatcggtccggtcctgccttggctcggtccggctcggtcggaccgaaggtgacgcgcttcttgtgcccagccgccggcgacgccctgcagtggcgccggtgagatccgcgatgccgcgtcccctccggcactgccgcgcccctcctcgattcagttttcctttcttttcattctgtcgaacagaaaacaagaaagaacgaaaggggcggggttcgatccgataatcatggcattatcccacgacttgtttcacgtccaaactgatccactaatcaaggaaggcccgcagagacaaaattgtgggctcatgcacgcgctacactaattgcatgtactccgtaataggggacattctgtgcgaggattgcgcacgtttagatcaggcacggctgttacgcaaggaataaagagagcgaaaactaaaaagccgcaccccagttgcacgtcctgtgcgggcatgccgtttaattagatcgggcacccccgatgcgtgatgcgtgcatgccgtttagatcggcacgtcccgtgcgtgcatggcgtgagtgttgcaggttcatggctagcaacgacaatggctagagctcgcggttcatgaataacagccgcgctgcccagcgcacaccttgccgccggcggtcgcgcatgtgacccacctcgccagagcaaccacgcacgtcgcacaactcgccgccgcacccgggcaagtcaccgccggtggccgttggtcggtccgctcggtccggcccgggcttcttcgttgccggtccggtccccaaaatcaggaccgtgatgcagctcggtccggtccggcccggaccgccggcggccggtccaaacgacggctcggaccgggaccggaccggcccggaccgtgtccaccctgaagcacgacacaggggacagtaagcagcagcagcacgaacacacagggcggccaaccacagaacaacatcatcagtacgggccggccacaaacacacggggccgacggcgggtaatagcagcacctgcaacatgacggggcggcggcggctcgctggtaaccctaaccctagctcgccggcccaggcaaattgggtgagccagagaaagaggactgacctagccgtcgcctccgccgaggaccacggcgaatcgctgggaggagccgccctcgtcttccgtcgagcaccagcagagacataggggcggcgggtttcgacttctgatccagatggatgggcgaagaggagagcgagagggatctgtagagaggcacgggatctcggcggctacgaagggcgactcctctcggatatcgatgccggctcctcgatagcctctcggcggcgaagcgggaggcagggtggtgacggtggagtgggagaaagagggaaagagagagaggtcgcagcgggagggggtggatcgagaggaggggtcgcagcgggagggagatagagagagggagcgatcgttgggttttttttggcaccggttttttcgtagaaggatagtgagttaaccgaggtgggaggatgacgaaaataaaacggaggtgggaggatgacgaaaataaaccagcaaaaataaatcgcgcggactactcaccaagtcgtccattaggagtagagatatcatgataaatatttattattcatgctagaattgtattaaccggaaacataatacatgtgtgaatacatagacaaacataatgtcactattatgcctctacttaactagctcgttgatcaaagatggttgagttccctagccatagacatgagttgtcatttgattaacggtatcacatcattaggagaatgatgtgattgacttgacccattccgttagcttagcacttgatcgtttagtttactgctattgctttcttcatgacttatacatgttcctataactatgagattatgtaactcccgattaccggaggaacacgttgtgtgctaccaaacgtcacaacgtaactgggtgattataaaggtgctctacaggtgtctccgatggtacttgttgagttggcatagatcgagattaggatttgtcactccgattgtcggagaggtatctgtgggccctctcggtaatgcacatcactataagccttgcaagcaatgtgactaatgagttagttgcgggatgatgcattacggaacgagtaagagacttgccgataaagagattgagctaggtattgagataccgacgatcgaatctcgggcattaacataccgatgacaaagggaacaacgtatattgttatgcggtttgaacgataaagatcttcgtagaatatgtaggaaccaatatgagcatccaggttccgctattggttattgaccggagacgtgtctcggtcatgtctaaatagttctcgaactcgtagggtccgcacgcttaaagttctgtgacgattggtattatgagtgtatatgttttgatgtaccgaaggtagttcggagtcccggatatgatcatggacatgacgaggagtctcgaaatggtcgagacataaagattaatatattggaagcctatatttggacatcggaagagttccgggtgaaatcgggattttaccggagtaccggggggttaccggaacccccggggggatgtaatgggcctgttgggccttagtggagaagagagagggcagccaggaggtggcgcgcgaccccccttgccccagtccgaattggacaagggaagggggcgacggcccccctctccttccttctctccaccccctccttcccccttctcctattcctactaggaaaagaggagtcctactcctggtgggagtaggactcgcccctttggcacgccctcctccttggccggccgccttcccccttgctcctttatatacgggggcagggggcaccctaggacacacaagttgatcattgatctctcccaaccgtgtgcggtgcccccctccaccataatccacctcggtcatatcgtagcagtgcttaggcgaagccctgcgtcggtagcttcatcaacatcgtcatcacgccatcgtgctgatgaaactctacctcgagctctactggatcgtgagttcgcgggacgtcaccgagctgaacgtgtgctgaacacggaggtgtcgtacgttcggtactgaggatcggtcgatcatgaagatgtacgactacttcaaccgcgttgtcataacgcttccgcttaacggtctacaagggtacgtggacaacactctcccctctcgttcctatgcatcaccatggtcttgcgtgtgcgtaggaatttttttgaaattactacgttccccaacagtggtatcagagccaggtttatgcgtagatgttatacgcacgagtagagcacaagtgagttgtgggcgatacaagtcatactgcttaccagcatgtcatactttggtttggcggtattgttggatgaagcggcccggatcgacattacgcgtacgcttacgcgagactggttctaccgacgtgctttgcacacaggtggctggcgggtgtcagtttctccaactttagttgaaccgagtgtggctacgcccggtccttgagaaggttaaaacagcaccaacttgatgaactatcgttgttaggtaagaacggttcttgctcagcccgtagcagccatgtaaaacttgcaacaacaaagtagaggacgtctaacttgtttttgcagggcatgttgtgatgtgctatggtcaagacatgatgctacattttattgtatgagatggtcatgttttgtaacggagttatcggcaactggcaggagccatatggttgtcgctttattgtatgcaatgcaatcgccctgtaattgccttactttatcactaagcagtagcgataattgtagaagcaatagttggcgacacgacaacgatgctacgatggagatcaaggtgtcgcgccggtgacaatggtgtcatgacggtgctttggagatggagatcaaaggcacaagatgatggtggccatatcatatcacttatattgattgcatgcgatgtttatcctttatgcatcttattctgctttgattgacggtagcattataagatgatctctcactaaatttcaaggtataagtgttctccctgcgtatgcaccgttgtgaaagttcgtcgtgccaagacaccatgtgatgatcgggtgtgataagctctacattcaaatacaacgggtgtaagccagttttgcacacgcagaatactcaggttaaacttgacgagcctagcatatgcagatatggcctcagaacactgagaccgaaaggtcgagcgtgaatcatatagtagatatgatcaacatagtgatgttcaccattgaaaactactccatctcacgtgatggtcggacatggtttagttgagatggatcacgtgatcacttagatgattcgagggatgtctatctaagtgggagttcttaagtaatgtgattaattgaacttttatttatcatgaacttaggacctaatagtattttgcttgtctatgttgttgtagatagatggcccgtgctgttgttccattgaattttaatgtgttccttgagagagcaaagttgaaagatgacggtagcaattacacggactgggtccgtaacttgaggattatcctcattgctgcacagaagaattacgtcctggaagcatcgctgggtgccaggcctgctgcagatgcaactgacgacgttaagaacgtccggcagagcaaagctgatgactactcaatagtttagtgtgccatcctttacggcttagaaccgggactttaacaatgttttgaacgtcatggagcatatgagatgttccaggagttgaagttaatatttcaagcaaatgctcggattgagagatatgaagtctccaataagttctatagctgcaagatggaggagaatagttctgtcagtgaacatatactcaaaatgtctgggtataataatcacttgattcaactaggagttaatcttctagatgattgtgtcattaacagaattcttcaatcactgccaccaagctacaagagctttgtgatgaactataacatgcaacggatggataagacaattcccgagctcttcgcgatgctaaaagctgcagaggtagaaatcaagaaggagaatcaaatgttgatggtcaataagaccaccagtttcaagaaaaagggtaaagggaagaagaagggcaacttcaagaagaacagcaaacaagttgctgctcaagagaagaaacccaagtatagacctaagcctgagactaagtgcttctactgcaaacagactggtcactagaagcgaaactgccccaagtatttggtggataagaaggatggcaaggtgaacaaaggtatatgtgatatacatgttattgatgtgtaccttactaatgctcgcagtagcacctgggtatttgatactggttctgttgctaatatttgcaactcgaaacagggactacggattaagcgaagattggctaaggacgaggtgacgatgcgcttgggaaatggttccaaagtcgatgtgatcgcggttggcacgctacctctacatctaccttcaggaatagttttagacctgaacaattgttatttggtgccagcgttaagcatgaacattatatatggatcttgtttgatgcaagacggttattcatttaaattagagaataatggttgttctatttatatgagtaatatcttttatggtcatgcacccttgaagagtggtctatttttattaaatctcgatagtagtgatacacatattcataatattgaagccaaaatatgcagagttgataatgatagtgcaacttatttgtggcactgccgtttgggtcatattggtgtaaagtggatgaagaaactccatactgatggacttttggaatcacttgattatgaatcacttggtacttgcgaaccatgcctcatgggcaagatgactaaaatgccgttctccggaacaatggagcgagcaacagatttgttggagatcatacatactgatgtatgtggtccaatgaatattgaggctcgcggcgagtatcgttattttctcaccttcatagatgatttgagtagatatgggtatatctacttaatgaaacataagtctgaaacatttgaaaagttcaaggaatttcagagtgaagtggaaaatcatcataacaagaaaataaagtttctacgatctgatcgtggaggagaatatttgagttatgagtttggtctacatttgaaacaatgcggaatagtttcgcaactcacgccacccggaacaccacagcgaaatggtgtgtccaaacgtcgtaatcgtactttactatatatggtgtgatctatgatgtctcttactgatttaccgctatcgttttggggttatgctttagagacggctgcattcatgttaaatagggcaccatcaaaatccgttgagatgacgccttatgaactgtggtttggcaaaaaaccaaagttgtcgtttcttaaagtttggggctgcgatgcttatgtgaaaaagcttcaacctaataagctcgaacccaaatcggagaaatgtgtcttcataggatacccaaaggaaactgttgggtacaccttctatcatagatccgaaggcaagacatttgttgctaagaatggatcctttctagagaaggagtttctctcgaaagaagtgggtgggaggaaagtagaacttgatgaggtaaatgtacctgctcccttattggaaagtagttcatcacagaaactgatttctgtgacacctaccccaattagtgaagaagctaatgatattgatcatgaaacttcagatcaagttactaccgaacctcgtaggtaaaccaaagtaagatccgcaccagagtggtacggtcatcctattctggaggtcatgttacttgaccaaggcgaacctacgaactatgaagaagtgatggtgagcccagattccgcaaaatggcttgaggccatgaaatctgagatgggatccatgtatgagaacaaagtgtggactttggttgacttgcccgatgatcggctagccatagagaataaatggatcttcaagaagaaaactgacgctgacggtaatgttactgtctacaaagcttgacttgttgcgaaaggttttcgacaagttcaaggagttgactactattagactttctcacccgtagcgatgcttaagtctgtttgaatcatgttagctattgccgcattttatgattatgaaatttggcaaatggatgtcaaaactgcattcctgaatggatttctggaagaagagttgtatatgatgcaaccggaaggttttgtcgatccaaagggagctaacaaagtgtgcaagctccaacgatccatttatggactggtacaagcctctcggagttggaataaacattttgatagtgtgatcaaagcatatggttttatacagacttttggagaagcctgcatttacacgaaagtgagtgggagctctgtagcatttctaatattatatgtggatgacatattgctaattgggaataatatagaatttctggatagcataaaaggatacttgaataagagtttttcaatgaaagacctcggtgaagctacttatatattggacatcaagatctatagagatagatcaagacgcttaattggactttcacaaagcacataccctgacaaagttttgaaaaagttcaaaatggatcaagcaaagaaagggttcttgcctgtgttacaaggtgtgaagttgagtcagactcaatgcccgaccactgcagaagatagagagaaaatgaaaagtgttccctatgcttcagccataggctctatcatgtatgcaatgctgtgtaccagacctgatgtgtgccttgctattagcttagcagggaggtaccaaagtaatataggaatgaatcactggacagcggtcaagaacatcctgaaatacctgaaaaggactaaggatatgtttctcgtttatggaggtcacaaagagttcgtcgtaaacggttatgtcgatgcaagctttgacactaatccggatgattctaaatcacaaacggatacatgtttacattgaatggtggagctgtcagttggtgcagttctaaacaaagcgtcgtggcgggatctacgtgtgaagcggagtacataactgcttcggaagcagcaaatgaaggagtctggatgaaggagttcatgcactatctaggtgtcatacctagtgcatcaggtccaatgaaaatctttggtgacaatactggtgcaattcctttggcaaaggaatccaaatttcacaagagaaccaagcacatcaagagacgcttcaattccatccgggatcaagtccaggtgggagacatagagatttgcaaaatacatacgaatctgaatgttgcagactcgttgactaagcctcttccatgagcaaaacatgatcagcaccaagactccatgggtgttagaatcattactgcataatctagattattgactctagtgcaaatgcgatactgaaggaaatatgccctggaggcaataataaagttattatttatttcctcatatcatgacaaatgtttattattcatgctataattgtattaactgaaaacataatacatgtgcgaatacatagacaaacatagtgtcactattatgcctctacttaactagctcgttgatcaaagatggttgagtttcctaggcatatacatgagttgtcatttgattaacagtatcacatcattaggagaatgatgtgattgacttgacctattctgttagcttagcacttgatcgtttagtttactggtattgctttcttcatgacttatacatgttctatgactatgagattatgtaactcccgattaccggaggaacactttgtgtgctaccaaacgtcacaacgtaactgggtgattataaaggtgctctacaggtgtctccgatggtacttgttgagttggcatagatcgagattaggatttgtcactccgattgtcggagaggtatctctgggccctctcggtaatgcacgtcactataagccttgcaagcaatgtgactaatgagttagttgcgggatgatgcattacggaacgagtaaagagacttgccggtaacgagattgagctaggtattgagataccgacgatcgaacctcgggcgtgtaacataccgatgacaaagggaacaacgtatattgctatgcggtttgaccgataaagatcttcgtagaatatgtaggaaccaatatgagcatccaggttccgctattggttattgaccggagatgtgtctcggtcatgtctacatagttcttgaacccgtagggtccgcacgcttaaagttctgtgacgatcaatattatgagtttatatgttttgatgtaccaaaggtagttcggagtcccggatatgatcatggacatgacgaggagtctcgaaatggtcgagacacaaagattgatatattgtaagcctatatttggacatcggaagaattccgggtgaaatcgggattttaccggagtaccgggggattaccggaaccccccaggggacgtaatgggcctgttgggtcttagtggagaagagagagggcagccaggaggtggcgcacggcccccttgccccagtccgaattggacaaggaaagggggcggcagcccccctctcgttccttctctccacctcctccttcccccttctcctactcctaataggaaaagaggagtcctactcccggtgggagtaggactccccccttggcgcgccctcttccttggcaggccgcctccccccttgctcctttatataggggggcagggggcaccctaggacacacaagttgatcattgatctctgccaaccgtgtgcggtgcccccccccccccccccccctccaccataatccacctcggtcatatcgtagcagtgcttaggcgaagccctgcgtcggtagcttcatcaacatcatcatcacgccgtcgtgctgacgaaactctccctcgagctctactggatcgtgagttcacgagacgtcaccgagctgaacgtgtgctgaacgcggaggtgccgtacgttcggtactaaggatcggtcgatcgtgaagacgtacgactacttcaaccggattgtcataatgcttccgcttaatagtctacgagggtacatggacgacactctcccctctcattgctatgcatcaccatgatcttgcgtgtgcgtaggaatttttttgaaattactacgttccccaacaccttagtgcacgcttgcgcacccacttgtggatatgtgtgacatatatcatgttcactgttttcacctcagggggaaatttcttctgtccccctgtgtttggtcggcggggctcatcatcatcctcgctttgagatccctttcccttgtgttcggtatttaacttaccggcctatttaaaaacccagcagtttttgttggaatggttggcaggcttgtcaggggtgccatgaatctggcaaggcctatcgagtattttgtccaaattagatggaccgtctctatttcctttgaatggcttcttccgctgaccgggcttggagccactgaatccggcgttgaccgtcgtatcttcagtttcttcattgttgttctgacgcttgtttttggtacgtcgtggccttccgttgccatccctggcttcagaggtgccagggtcgctgatactattgcttctacgaaccaaccagctatcttcgcccgtgcagaagcgggtcataggtgcagtaagagctgccatagtcttcggcttttcctgaccgaggtgtcgggcgagccattcatcacggacgctgtgtttaaaggccgctaaggcttcggcgtccggacagtcgacgatttggttctttttaattaagaaccgagtccagagtttgcgggctgactctccgggttgctggactatgtggctaaggtcatcagcgtccggtggcaccacataagtaccttggaagttgtctcgaaaagcatcctccaagtcttcccagctgccaatagagttctctgggaggttattcaacaagtgtcgcgctggtccttttagctttagggggaggtatttaatggcgtggagatcgtctccacgagccatgtgaatatggagaaggaaatcttcaatccatacagcaggatttgtcgttccattgtatgcttcaatgtttacgggtttaaacccttctggaaactggtgttgcgttacctcatcagtaaagcataaggggtgtgtggtgcctctgtatcgggcaacgtcacgaaggagttcggatgacaagccaagcaattgtttcatactttaacgccaagcttatcacgccaagcttgatggtcgtcatctcgtgttggagcacttccccgtgatccgtagattgatctagtctggccgactctattgtccaggtcttgtcgtaggtcataagtatagcctggagccgctacctctttgccttgatagcaaggtggtgtgggctggtgttcggcataggtagccgttttgtcccgtccacgtggtggtcggtccagctcgtcagcatgattatattttgacggtattggctcaagggcctcgtcgtcgaattgtggtagtagccttcgttttggatagctctttgttggatgctcgaggccgtattcttcggcaaccaggaccttggtccatctgtcgttgagcgtatcctgttcggcttgaagctgttgttgtttctttttcaggctcctcgcgatggcgatgagctgccgcttgaagcgttcttgttcgagggttcctctggtacgatgaaatccttgttaccgagggtaacatcctcctcggagaccggtaaatagttactatcttatgaatcttcgcgatcgataggtttgtctgggttgacttgtccttcttcccactcatcatgctcgagaaaaggacagtaacaacggcgctgtggtggtgcttcgatgggcttgtcctcaatcaggtcttgcatgccatcgtcgtcgtcctttttgggtgtatccaccatatacacgtcgtatgtagaggtggccgtccgacgcccagtggtaggcgggttttggcctgggtcggctccgacatcatcgtccataccgtcgatgtcctcggaggcgtagtctagcatgtcggttaagtcctcgatagtggctaccaagtgggtgggtgggtgggacgcaaaattccccgctctcagcccctagttcgggctgggcatagttcagaggtgatactttcgtaatggcgagcgatctcattaggtccagagcctcgtttaggagcgaaggctggacgggtgaccgaggacctgcggagctgggcatggtgaacgaggcctgacagtgctcaaggagcgcaggcctcgagagttcggagttagcctccagaggtgagtccggctttccgataacagggagaatcctgcttgattccagtcgtgccgataatatagtcacctctgggtctccggcagggagcttcgtagtaggagagggtccggcggggctcatacttccgtcttcggacagggtggtccgctctggatctaaggctggggaaggaacgatatttgattcttgaacggagcctgatggttgctacctcttgagcactgcgttggatttccccgaagaggagaggatgatgcagcaaagtagcgtaagtatttccctcagtttttgagaaccaaggtatgaatccagtaggaggctacgcacaagtccctcgtacctgcacaaaacaatagctcctcgcaaacaacgcggttaggggttgtcaatccttcacggtcacttacgagagtgagatctgatagagatgataaataatatttttggtatttttgttatagagatgcaaagtaaaaagtaaaaggcaaagtaaaaacaaagcaagtattaaagtgatggagattgatatgatgagaatagacccgggggccataggtttcactagtggcttctctcaagagcataagtattctacggtgggtgaacaaattactgttgagcaattgacagaattgagcatagttatgagtatatctaggtatgatcatgtatataggcatcacgtccgagacaagtagaccgaaacgattctgcatctactactattacttccactcatcgaccgctatccagcatgcatctagagtattaagttaaaaacagagtaacgccttaagcaagatcactactagaaattaagccaataacgaccaacgtctaaaagtcttggttgttattcttacgatgagctagtcgcacgtttaaactaaccccacgaaacctccccaacagcgatggatatgccggtcgttagtttggtggccgttgttgattaatactccatatatttgagtacttctatttatttttagagtaattagcatccttatctggtgaaacgagggagataaaaggaagaaaaataaaattcacttctaactatccctacagtctcgcgtctaggtaaaccactgtggcgcgtcccctctcagattgagccgctcgcccctgcagccgccgccgccatgaacgccgcatgcccacgtcgtcccctcgcctcctcgtcccaggacaccgacccagatgcgctcgctgctgaggtcgtccgagtggagcagaggatccacgctcgctgccgagtggagcagaggatcgacgctcgctgccgaggtcgcctgagtggaccggatcccttgtcgggtggttgacgagcagcgcaacgaggtccagaggatcaacgccaaggtcagttccgcatccatcggatctaatagttcagtgacgaggtcaatactcctacgtgttggtcggatctagctcggtgatgatgtcagtgttgctaccgcatcggccgtatttagtagcgggctggggatatttggagtggatcactaatggtttaacagctgttcttattcagatatttagatgggagggggaggcaggggcggatacgatgcaggactcgtctaggacggagaaagggcgcagctgctgctcaatgcgaaaacagaggtgaattcgggttgtagtctctcgcatggcatgaacatgacagatatatcggggacgagcattgtcgggacgtgcataggctgccgtgtagcaggtaattaactagctaaattcttcactctgaccatttttgtttgagatttttttcaatttgaaagtgaagatgtaaacctggatgcaggtttggggaggtgatggcgccagtcttgtgaagggatgcttggagatgcgtgtggcactgatctaggtacgtgcatacacttttcagaacaaagacgttttttgacttgcctgatctgaaagtgaggacaatgtgtttggctgctgattatttttaacttgtacgtacatgattgataattttggcttgtgtgaactgaaaagaagagttaacgagtttgatcttcagaatgacctcgtcaatcgatggcctattgacttgtacatctagagatctgtcaatgaatgcatagcctaattattgagcaacaacgtctaaaaagatatcatgtgcaatatatagtcgtgtatacctgatgtatacattttttcacttttgatttaatttgttagaatcgcaaagagcagattgccattgtagacgctgagtacatggtccattgtgcagttcccatgctccagggcgaggtaattgtaagtttttcttgtaagcttaaacttctcaaaaattgatgtctccttacgtgctctgtttttcatatgctcaccactttgaagctcctcttctcctccagggtcacaaagaaaagctaggaggccgttttgaggtatgtatatcactcactcttgagaataatatttggtttgaatttgttgggtatatgtgttaagaaattagctgggtatatgacaacaaccaaaaaaagttcatttttttctgagaaataaaataactccagttttgcttgaattagaaaagaaacattccaattaatatttgcttaaaatagtttgcctttgtcgcacaaggctaaggactattgaagaattcaagtggaaacttgttgctttatgatattatcctctttgctagttcttttatatgtactgacatataaaccattagtgttttttgtagaatggatggtccaccttaaaagtaacatcacgaggcattgtagacattggtgaaggatgataaggacttgttatggtgtttcatgagtgaagagaaaacatttactggctatttcttgagtttttttggtacaaatgaacatctatattggttgttctggatagcgtttttggttagtaattttgcaatggttcttttatctccagatatgtatgtggggaattagagacattgcgaggaccaacattaagtaaggcggaattggtttctaaactacaagctggtgagcaagcgaggcaagtgcttgaaggaacgttcaatggcatggtgcaagaggtgttagaaattaagtgtattgtgtctagtatatcagtaagtggtagttctcatggaagccaacttgaagtttcttaaaggatattttaatgtatgtcagaatattggtatttttatcaataaaagaggctatgatcctttaaaaccatattctcttgtttttatattaatatgggtgttagtattgaaacgttggatgctgcataaaatgatcgttaaacgcaaaattatactaaatataagtggttctgaaggatatcaatgtgtgaagagagtggttgctaatgatactttggtcagcatgataacattattagcgacgaaaattgtggtcgttatttccatgggattgacgaccgcacaccatctcgtcgttacaagataacgaccacaaaaggtatgtggtcgttatacttttaacgacggagcctactacgaccagcagattgtggtcgttaatgacccttaacgaccacaatccgacctttagcgaccacatataccatcgttaaaaaccgttttcctagtagtggatgacatgatgtatagggataaattcatgcaatatgataaaaaaaaccatcttgttatcctcgatggcaacaatacaatatgtgccttgctgccccttctgtcactgggaaaggacaccgcaagtttgaacccaaagctaagcacttctcccgttgcaagaactaccaatctagttggccaaaccaaacggataattcgaagagacttgcaaagataaccaatcatacataaaagaattcagagaagattcaaatattattcatagacaagctggatcataaacccacaattcatcggtctcaacaaacacaccgcaaaaagaagattacatcgaatatatctccacgagagagggggagaacattgtattgagatccaaaaagagagaagaagccatctagctactagctatggaccccgaaggtctgaagtaaactactcacacttcatcggaggggctatggtgttgatgtagaagcccaccatggtggatgccccctccggcggagctccggaacaggccccaagatgggatctcgtggatacagaaggttgcggcagtggaattaggtttttggctcctcttctgatcgtttggggacacgtaggtatatataggaggaaggagtacgtcggtggagcaacagggggcccacgaggcagggggcgtgccctagggggggcgcgcccccaccctcgtgaccgcctctttcattccttggagcagggtccaagtctcctggatcacgttcggtgagaaaatcacgttcccgaaggtttcattccgtttggactccgtttgatattctgtttctttgaaacactgaaataggcaaaaaaacagcaattctgggctgggcctccggttaataggttagtcccaaaaataatataaaagtggaaaataaagcccaatatagtccaaaacagtagataaagtagcatggagcaatcaaaaattatagatacgttggatacatatcaggcatccccaagcttaattcctgctcgtcctcgagtaggtaaatgataaaaagagaatttttgatgcggagtgatactttggcataatttcaatgtaaatcttcttaattgtggtatgaatattcagatccgaaagattcaagacaaaagttcatattgacataaaaataataatacttcaagcatactaatcaaagcaatcatgtcttctcaaaatagcatggcaaaagaaagttcatccctacaaaatcatatagtctggctatgctccatcttccccacacaaaatatttaaatcatgcacaaccccgatgacaagccaagcaattgtttcat

SEQ ID NO: 26 - DNA, 17615 bp, Artificial Sequence
  Scaffold 75951
  misc_feature (1)..(340): n is a, c, g, or t
  misc_feature (479)..(557): n is a, c, g, or t
  misc_feature (689)..(1172): n is a, c, g, or t
  misc_feature (2113)..(2175): n is a, c, g, or t
  misc_feature (4337)..(4429): n is a, c, g, or t
  misc_feature (4744)..(4766): n is a, c, g, or t
  misc_feature (6348)..(6469): n is a, c, g, or t
  misc_feature (11081)..(11122): n is a, c, g, or t
  misc_feature (11918)..(11927): n is a, c, g, or t
  misc_feature (11992)..(12170): n is a, c, g, or t
  misc_feature (12179)..(12201): n is a, c, g, or t
  misc_feature (13714)..(13812): n is a, c, g, or t
  misc_feature (14248)..(14274): n is a, c, g, or t
  misc_feature (16858)..(16933): n is a, c, g, or t
  misc_feature (17468)..(17497): n is a, c, g, or t
nnnnnnnnnnnnnnnnnnnnnnnnnnnnnnnnnnnnnnnnnnnnnnnnnnnnnnnnnnnnnnnnnnnnnnnnnnnnnnnnnnnnnnnnnnnnnnnnnnnnnnnnnnnnnnnnnnnnnnnnnnnnnnnnnnnnnnnnnnnnnnnnnnnnnnnnnnnnnnnnnnnnnnnnnnnnnnnnnnnnnnnnnnnnnnnnnnnnnnnnnnnnnnnnnnnnnnnnnnnnnnnnnnnnnnnnnnnnnnnnnnnnnnnnnnnnnnnnnnnnnnnnnnnnnnnnnnnnnnnnnnnnnnnnnnnnnnnnnnnnnnnnnnnnnnnnnnnnnnnnnnnnnnnnnnnnnnnnnnnnatcttttgcaatatggttatctttcttaaaaatttgacagatgccatcatacccttgcagaaaggaggtgctgccacgttgacggccgtcgttgttgttgtagtacgggcgctcggaggtgttccggttatggtagccnnnnnnnnnnnnnnnnnnnnnnnnnnnnnnnnnnnnnnnnnnnnnnnnnnnnnnnnnnnnnnnnnnnnnnnnnnnnnnncctctgtagccgccatggcattgtcgtcgctcctatatcgggggccactgtggctccccttggagaggttgccgcggaagcgtgcagcagcattagcggaagatttgaatgctcccgtgcccgtcccatggnnnnnnnnnnnnnnnnnnnnnnnnnnnnnnnnnnnnnnnnnnnnnnnnnnnnnnnnnnnnnnnnnnnnnnnnnnnnnnnnnnnnnnnnnnnnnnnnnnnnnnnnnnnnnnnnnnnnnnnnnnnnnnnnnnnnnnnnnnnnnnnnnnnnnnnnnnnnnnnnnnnnnnnnnnnnnnnnnnnnnnnnnnnnnnnnnnnnnnnnnnnnnnnnnnnnnnnnnnnnnnnnnnnnnnnnnnnnnnnnnnnnnnnnnnnnnnnnnnnnnnnnnnnnnnnnnnnnnnnnnnnnnnnnnnnnnnnnnnnnnnnnnnnnnnnnnnnnnnnnnnnnnnnnnnnnnnnnnnnnnnnnnnnnnnnnnnnnnnnnnnnnnnnnnnnnnnnnnnnnnnnnnnnnnnnnnnnnnnnnnnnnnnnnnnnnnnnnnnnnnnnnnnnnnnnnnnnnnnnnnnnnnnnnnnnnnnnnnnnnnnnnnnnnnnnnnnnnnnnnnnnntgtggatttgtataagtacccactagcatatatgtccgtgtattacaacctgagagatatttttttaccagaagcaacgtgagagaaatgatgtgtcctccgaaaatagtctccgcagcagtggacaacagagtgaggagctgcagtcttctcgcggggcatgtttagcacacgagatcatgatagtggtgggtttgttggcgtctcctacgacggcgtaaccggatgtattactaattgtagcgcataaatcaaagacccgatgacatgttactagctagtcagacaaacgtatcccaatacccaatggccagcccgaatatttaagaacataatgcagcgtcaaattcaaagcattttatgatttttgatcttttcatgaaaaataataatgaatttctgaatattctttgaaacgtgaatagtttcttattctgaatatttccgaaaaacatgaacaaaatttgaaattggaacatttttttaattcaaaaaaaatctgaaaacatgaaaattttataaaaacacaaacatttatgcattaatgaacaatattttaaaatgggaacatgttttgaacattaagaattactttcaaagatgttttttatgcaaaattatttaaaatttgtgaaaatttcagttaaacaacaatattttcgaatttcaaacatttttaaaatgcaaaaataattattctaaatcccgtctaattttgggtatattaaaacacaatgtttttcgaaaaattgggtatatttatttattttgaacgaatttcggaattagaaaaaaataaagatctgaacattttccaaaccaggactttttttggaatttggaacatttatcgaaaatttggaaaaacaaattgaaattctgagtattttgaaaattttgaatttatgaaaaataaataaacttagaagggaacaagggannnnnnnnnnnnnnnnnnnnnnnnnnnnnnnnnnnnnnnnnnnnnnnnnnnnnnnnnnnnnnncgggccagcccagtactggcgacctgtccaagctccggctatttgacgctccatgcggcaaataggttggctcgcttagctgggcctcagagcgcagcccaggtacgaaattcaggacaaaccatttttcttttctagtagatgaatgcataaaaatttagtaccacctcggataaaaaaattcatcggtgaacggatgaaaaattggagaaacgcactttgctttattatttacaagcacatacccgtgcgttgcaacgggagaaaaattagtatgtatttaaagttactgagcattatatgtgcacacaaaaccctgtgcgcacgtgaaaaagaaacatttagcttctcggtttccccggacatgaagtaatcaatcagctttttttacatttcttgatcaagggcatttaagagttttgctacgtcaccgtacgccagagaaggcccattaattatacaatctacttttcctataaatcgaggagattttaaggtatgatatttctgaatattgttggaaacttgaaacattttaaatcctgaacattttttgaaaactatgtacactttcagaaaaacgcgaacaaaatttaaaacaggaactccataaaaattaacaaacatttttttaatcaccaacctttttataaaaacatgaacattatttgaatttatgaatatttttttagaacgggaacatgtgttgaaaattcataacatttttcaaagaatataatgaattgtgaaaatttcactaaagaatattttttcgaatttgaagcattttttaaattacaattttatttttagaaatctcaaacaattttgtaaaacgattgaagcttttgaaaaaatattttctaaatagcaataaaaaattaatattctgaacattttctataatttaatttttattcttaaaattatatacattttttgagtattttgaaattaaatttataataaaaagaaacttagaagtgaaaaaatagatacgggaaggagaatataaacagaagtaaaatacagaaacaaagaaaatttgccagcccattatcggttatcgtgtgcgaagctgaaactatttgccgctctgggcggaaaatagaattttcccagctgcatggtcagaaaaataagtgggatggcttcgttgggccacagtgcgcagcccacgtacgaattctggaaaggcctttttctagcagataaacgcataacactgaaaaaaaatggttcagctcagcttgggcgccccgtgcgaatttccgactatttctcgctcggtgcgataaaaaggattctctcacttacatgggtaggataataattgggctgaccttatgggccagaatgcgggtggcccatgtacgaaattctggtgtttttccttttctaatatacgaaaggacaaaaattcagtaccacatggaattaaaacaatctttttgatggtggccggatgaaaaaatcggagaaacaccttgctttttgatggtgaatggataaaaaaaaggtatagatttagatatataataaggtataggtcaaaaccaaaatattttttaattttgtgaccgaattttgaaagtggaacatattttgaacattcagaataaatttataaattgtgtttttaaacgcagacattattttgaatctgttaacattttactaaaagaataataatttcgaattgcgaacaattttttattatttctgaatctaaacaaattggaacaagaaaaaaatggatgttccaaacatttttaaatagggaagacaatattttgagaaaattcgaaaatttgacaaaaataaattttctaaacttttttgaaaattatgaattactaaattatgtaaaaataaaaataaattttgatggaaaagaaaacgggccggcccagtcctgggcaccttgtgcgaactccgcctatctaccgcatcggccgagaaataggcattttgctgctacattggcaggtaaataagtgggctggcttcaatgggccacgacgtgtgcgggccgagtacgaaattcgggattgctaaaaaagcaggtggactcacaaaaatttagtaccacctcaaatagaaaaataattttcgatggtgaacggatgaaaaaagtggagaaatgcaccgtactttattannnnnnnnnnnnnnnnnnnnnnnnnnnnnnnnnnnnnnnnnnnnnnnnnnnnnnnnnnnnnnnnnnnnnnnnnnnnnnnnnnnnnnnnnnnnncatgcccgcaaccctgatctgagagagcacttgggcatgccataggatatagttggtgcgggagagtttctccgagacttgagaggcaaggttgaaggcaagggtggtggaggagcacaccatggatggagggaaaaaaacaggagctagatatatactacgggaagaaggggctctctataccatgtgcaagatgatcgaagcgtctcaactctctgtagagagcccgcgttggtttatagtattgattatatggggcttatctcatcagcacatacatatttggttacaatccttgaggatcaagggaaatcnnnnnnnnnnnnnnnnnnnnnnnatacaaggaaggttacaagcagaataaatctcctaaacaatatcctcctaatacaaacatatgtgccaagtacattgcccactaatattacgttcaacagagtggagaggaatgctgcggtgagtgtgtgagagactgtggcagcgtggggaggggctcttcttatatgggcacccgagctccaaggctgtaaccgacatttaacccgctggatggcgcgtaatgtgtttttcgagcatggagcatcgtatttcgctattttcgggaaattgaaatggccacgatttgcactagtaccgcctccgggttatgcagcgagtttcggtgaaatggttgatggccaagtggagagtgtcatttagccaattcggacatggccaagtggagagtctcatttagccattctacatgttagcttaagaatacttgctttcactttttcctcacaaaagagacaaataaatttggttgttgtaaattgtgatcccgccatggaaacattattttacgccttgtgtatcaagacaacatccacgtaaactcattttattggttgctgctacaatcacagccgttcagcatcgcttgtatacgatcccatgatcgacaagctagctcttcagatcttcctctcttgtcctaaaacggggcagcttggaggctaattatccaccgcggcgtccggtgcatctgcaaaatcgcaatgtaagaacagaaatcatcagaagaagaaataatcctttccaaaagtaaaagaacacacagattcaactcgtcaagattcaaagaagaagaagaatgtgataaaaggtggtccgttgtcccttaccggccggcgccgctgacgattcgcaggcgcgtgtctcgcagtcgcatggggcgccgccgccgccggcctggctggcgaagatggtgcacgagtcttggcaggacgggatgcaggcccagcgcgggttgtggtggtcgttcctgcagctgaggtagcagccgtcgaagcactcgcagtactcggaccgggacttggcggccgcctgcccgggcagcagcagcaggaagaggaagaggagcacgcacagcgcggccatggcggccgccctcggccccttcccctccatctccttcctcgtgcaagctatggcttctcttcttcaggatcaagggagagaactgttgtggtggctgtgtttgtgagtcagggtgtggggtcttatataagcactgcagttccaagggcagaacagacatttgacccggataacccgtaatgtattttccggcatcatatttcgccattttccagtaaatgaaaagggcacgactttttcccctagcatcgcgctgggttgtgcggcgcgttttcggcaaatggagtgccccctgtagccagttttgccatggcgttcatctctgaagataacatcactcaccttggacccccgaaaagattagacaaaggtactcatctctgttttcgtagacaagactccatggagctgcctgtgctgatgtggaaaggaaacagaatgcagttctgaaccaatgctgtttatataacactgaaggttccatgtttaatacgtannnnnnnnnnnnnnnnnnnnnnnnnnnnnnnnnnnnnnnnnnnnnnnnnnnnnnnnnnnnnnnnnnnnnnnnnnnnnnnnnnnnnnnnnnnnnnnnnnnnnnnnnnnnnnnnnnnnnnnnnntagtgctgtacctctttagatgtacagctatgcgtgagagaattcagatcgagctcattggcatggcagcaggcaattacttccaagccgtttacaggcttctgaatgtaataattccaatggaacagttcatgccagaaaaaaaacgtcttctagttacagggggcaaattatatgttcattctgttaaacaaacaagccaccatccgaaaacttggtgtgtatcacaaacccttgagaactcatgcccaaaatcgtctataaagtgtgcggaaaatgatcctacttcaaatattcagtcctgcatgcgcaccgatcaacaccacataaaactgtgtgccagtgtaagtgattcacggccctttctcttcgaggcaccatgagttctgtggtgtttcaccatcatctagggtgtcttctaatgggaacttgtggagctgttagcgctatctatcattgaccatgcagaggtaaccacccccggcgctccgttccaggggatacctggtggcacccttcatgtaccgaaggtgattcgtggcagcatctcggaggccggatctatttggcgcctttccgttcttgcgcttctttatcatggtgcaagtcctcagagggtcatcacttccagccccaggtctcctacaacacaattcacgacaatgaattttttcagtcatacaacttgcatcataatgagagacagttaaattacagcagcaaaacttatcacatgtaataattacagcagcaaaacctatcacatgtaatacaacgtcaataccctaagtaaggctcttgtggcttatttagaagattgggggggaagcaaaagcaaatcaatacagaaaggaatgtccgaaaactcacttcaacaacttctctgaagcaactctagcagcttcaatggtgtccttggtaggcagccacttcactaccctaccaggatcaccccgcattggcgaatggatttttacaagctgcacatgatattctacaacagtaaatgatcccttcatgcagtaacaaagaaaaaaaatacttgtactgctcaatggatgtaaacatggttttgtcagataggattagaggaagagacactcacaccaagacattccatcatttgataatatgctctgccatgtagtggagtgtgtccctttctggactctgaaaagtatctcgtcctgaaagagtgtaacactaaacgtaagtaaagtgcatgcttacaatgacagttaacatgttaaatcacctaccattccttgtagcccgggtctactgtaaagccatacatgtcaacgctgtcacagatggagagagcaaattcaagagctttaagcccagttcctttagcagatgaaccaaatgatgtgcctagcatgaggtatactggattggttattggaagttcctacataacaagagttctgtcaagcaggtaggaaaacaaggaacatgtacccaaagcaccctagtttctaaatatgatgtagctaaattacccgaatcatcttgttcatgatatcatgtattgttgtcttcactatcaatgcctccttttttgtttctgcaaccataagaattagcatgtcttttcatccctgaatcctactgatagtgatagggaaataggtggctgggagacttactatctaactcaacaactttatccagtgcctttgcagatcctctattaagaaggcgaaacgtactcttttcaccaacatattccgtgtagttctgcaatgcagaaagaagaagttagagcacgtccaagttacgaaacaagagcaggaaatatagatatcttatgaaaacctggacaggtgcaccattttctcgaatgacaacatcataagaatcaatctcatccccaaatttagttttaagaagatccccagagtttccaacaacagcacagctaccaaactgctgaggtacatatggtgatgtctcagggagaaccaatgaaagcttctccatgcaaagagttctgttcttgcacttattcctgccaacccaaaaataagcataatcaacaatctctcttgaatttaaccataatgtaagtctatgtcaaactgtgaaacttttgtctacccacagaaggattcctttgttgatcctgcgccatgcatactcctcccagccatttggtagtgcatcaatgtactcctttgtgagtattgtagtactgttgcgaacctaggaaataaaataaaattatgtcaagtgtcaaggcatcagttagtgttgttttgcaaatattcagtgcaataattaaatcacacagataagtcagtagagtaaaaaaaaatgcccacctgctcccatgaggccacagcttcgcagagattgaactcaaatgccaacccttcagactctccagtttttggatctgtctgcaaacaccagtcataagagcaaagacaacgatcataaaagtaagacaagctggtctaacaatgagaggaacaacagatgcccatgttccacgcttgtctatgtagtagagttgccaggtacaaaatcaaattaaggaactcaaaggagaaatgccagcataaggaaagaaatgaccgagcaaatgcgcacttacccacttagaaaccgtgtccctcgggtactgtataacaacacgacagtaatcctctccgccaaacgcttgcagtcctagaccattagcatcctgcgagaaatttacacgagtaagactcgtccaaaccagcacgctgatgacctcaatacagagatttgtagtagctagcaacacgattattggtgagagttgccctttgaacataaaaaaaaaacatgaatcattccaaacatcaaattcaccccagtcctagataaaatgaaattttctcttatactatgaatcctccccatctactaaacagtaagcatcagactcattgacatcaattctcagaggaagtccagaaattatcaagcagttatcctgccaaagcaccaaagctcatgcatctcagaagctaatggccccaggcacaacacaatgtagcatcgaatttgcacacagatgatacagctgagccccaatcggttctaattttaacagagccacagaaaatcgacacggtacaggaggggcagtagatcagagacaaggtagggacgtaccacgcacttgctgaaccctccctgcagcgcggcgagcgccgccaggtccgcctccgagagccccgcgccgccatctgcatccagaacccaccgcgactcagggatctccaggcgaagcaaaaaaagcagaggaaagggggagagataggcgcgcgggggagcggcggaggggggtgcgttacatgaggagaggccggtgaggtagatgaggatggccgtgacgccggagaagatggcggcggcgagggccagcgggagcacccgcatggtcgggaccggcgattccctctcgccggagctgtggccgcagtggggagtgggagtcggcgattgggccgagcaaggaatggcagcggcgcatctgtgtaccagagggcccgcttcttttttagacaaaccagaggcccgcttgcttaagcgaagaggaaaatgggccgtcttcgcttttgggcctagtgcaaccaactcatgatataaatgtttattttgtgcctcttaaaaaacgacaatgctaaaatcctgccgactggtggtttgctacagatccgcacgagcgcgtcgttggatctggatcgcacgatcatgattttttaatgaaaactaactgtagccccacgtatgacgcgacatcttacggaaactacctccccgaaatcatgctgattataacctgcccgcccgcactccccttttttcgcgctgaattaattacgtgcacgcccgcactttccttttttttcgcaggtgctaataactatccaaaaatagagcaggttgggcaattaattttttttcacaggtgctaataactatccaaaaatagagcaggttgggcaattaaaattgcatgcggggggcttgaactcagcacctgtaacatgtagctaaggatgaccttaatccactaaccactccacactgtgtagtacgggttaagtttgataaacctaaactatttcatcatgatatttagtactgcatcttctataaaacatacattttcctttttaattccatgagttttctctagtttatctttgtttgttccactttatgatggaaataggtatctccgccaacacccggatgacggtgtggatgattttggtgatgtgatcaacgattcttctaaataatattcagtccgagaggtaggagatgttgacgaagagaaggtggtaggtcgtctctgagagccggtaatttttgggccgcaaacatgataatttacgtacaaacaccgtgataattttagcccgaggcgaaagaagttgttgaaatataccaaccggtaatttctatgtgaatagcctggtaatttatgcaccacgggtctgataacttacatgcaaacatgatgataacttctaaaccagaaaaagttgatgaaatataccccagtaattcctttgtgaatatcatgatttacacaccgcaaacatgataacttttccctccgtannnnnnnnnnnnnnnnnnnnnnnnnnnnnnnnnnnnnnnnnnttgacgagatataaccttgataacttctctgtaaatatgatgatagtttacgcatcactgccctaataacttacatacaaacatcacggtaagttttgatcggggtgaggggggtgctgaaaacacacagcccggtaactttcaagtaaatagcatgataatatacacaccacatatccgataacttaattacaaactctgtgataacttatggctcgggaggaaaagtgtttgaaaacatagcaggtaagttctgtataaagaacatggtaaagtatgcacaacaaagttgataactcacatacaaacaccatggtaacttttgtgaccccaaaaaatcttcatcaaacaccgtgattgatgaaatatccccctggtaactttttatgtgaataacatggtaattcaaacatcgcataccagataacttatgtacctcggtacttacaactttggcatgggggaaggggttgatgaaatatcccctcggtaacttttgtgtaatagcatggtaactcacacaccgcagacctgataacttatgtgcctcggtcccgatacctttagcgagggggttgtttagaaacatccccgtgataaccttcgcataaatagtttgataccctacgcatcgtatacgtgataactcaagcacagacaccgcggtaactttaacctgagctaataagaaggttggagaaaccaggttataacccagtaatatatgtgtaaacaatatggtaacatatgtagcacatgcgtgattacttatgtagcctagtcgtggtaacttttnnnnnnnnnnaggaccatttttatgccagataatttctatataaacagatgtgataacttactcagcctgggccnnnnnnnnnnnnnnnnnnnnnnnnnnnnnnnnnnnnnnnnnnnnnnnnnnnnnnnnnnnnnnnnnnnnnnnnnnnnnnnnnnnnnnnnnnnnnnnnnnnnnnnnnnnnnnnnnnnnnnnnnnnnnnnnnnnnnnnnnnnnnnnnnnnnnnnnnnnnnnnnnnnnnnnnnnnnnnnnnnntcgtttcannnnnnnnnnnnnnnnnnnnnnnactctaatcatcagaatagaattgctttcttcgtttactcctcatgcattgcgcgttgaataccgatgcctgggcatgtgaataagaatagcagtagtcgtgcggatctgttgttagcgaccagtcgactggtcgttagcacagtcccttaaaaaatatttattcccctaaaaacattatttattttgtgtaactttgtttatgagtttagaagctcaaatttcggagttcacaatctagcgaaacatgctttacgtctaggttggcctccatgtttggttaagccaatccggtgaccttttgttcgtccatgtaaacattgggcaaagtgagaccttttctgatcaacaaatcataggatgacttaacatagtgctcgtatatgtacttcatatctaaatccattgcttcaaagaagggttgcacggtcatttcactgaacacttgccagccgtggtgaccctcctaggggcggatagtacctgtgcgacgggcggacgagggatttggaccggcggtggaagacaaacggcgtggaagccgggtgtagcggtggaggtcgcgaaggtcgcggagttcttggaagggcttggtgggcggccattgtggaagagcggcggcgcgagagagaaagcgaagaatgcagagatagagggaagggtgtcggagtcatacatgactgatgtccagactcccccaaagccccctggtttgcttccgatttgcgggaaacggatgaccggactggctcacgtaccgatgcgggttcatgttggacggcaactgctaccggacaactcggtccagaagcttgcgggaggtttgagagtccgctttggagatgcccttttattgtgttaatggtttaggttttacagtttagggtttacatacactaatttgctagtaagatagcaagtggggccaacacctaaaaatgcaagacaatttttgtatcttacagatagatttatttcaaaatacataaacatttatttttgatatgtatgaacaatacacgaacaatattgatattatgcatgaccaggagcggatctaaggagctgccggccatggcaaaacagtttatacagtgtacttagttcagtttttgtaacaagtaaatgcttttttgagacaattcgttagatttatgatgatatttagatgaaaaagacataatctaaatttatgtaaaattcttaaactttgtagcaatatatcgaagttggcaccctcgatgcttagagcaactctaacaattcccctaatattcttcctgtaaaatcagttatgcagacgactctaacctttagggagagttgtccaagagcaacttttgtcagctcgggtaaacttctccctctaaatttgcttttatttttatttttcattaaacaaaactagataatggcctagggcccgctagtcaatgacatgcgtgatggcctccagcgaggggccgcgcgagtaatacggtggccacaggggaaaggcagcgtggtgaagtggnnnnnnnnnnnnnnnnnnnnnnnnnnnnnnnnnnnnnnnnnnnnnnnnnnnnnnnnnnnnnnnnnnnnnnnnnnnnnnnnnnnnnnnnnnnnnnnnnnnaaaagcaacggtggtaccgcagtgcatcggcagggccgacaggcggtaacgtttgggtgggatggtggcggcacggcaggaagtttactagcccgccaagaagttaattagaggtgtcatcttcccgtgaagccgcatgaatattgagtctattttatgggatcctctaaagctaaggttagtttacggtaatttttttctttttgcggaaagtttacggtaactattgaaggggctttttttgcttcaacttttcatgaacggcggttattttagagacactagagctgttgaagttgctcttagatctaaggtccgtcaccgtgcatgaccatttactttgacacaagtgcatatttttattttagtaccatggacttctttttctaaattctgtgaacatatcattggaataatatttagcagcatatgaacnnnnnnnnnnnnnnnnnnnnnnnnnnngtaggaataatactatttagcagcacatgaacattcttattttattttaaaggactttgctctttgctagtcttcggccagcagcccaggctaccagcacaagataagtggataaccccatcgcttccaccggtctaccagctctcctcgtccagccagagaaaccagacagccatggcgtcgctagccctcaggcccatcatgccagcagccgccgcggccgcttccacgaccacatctctccaccgctcccgccgcagcagctctacccttctccgtcgccggcagccagtcacgtgcatggccgagagcagcggcgggggcaacagcaccgtggagctggccgccggggcggcggggctcgcgtcgtgcgcgaccgtggcgtggtccctctacacgctcaaggcgacggggtgcgggctgcccccgggccccggcggctcgctgggcgcggcggagggcgtcagctacctcgtggtggcgggcatcgtcggctggtcgctcaccaccaaggtgcgcaccgggtcgggcctcccgcccgggccctacggcctcctcggcgccgccgagggcgtcgcgtacctcaccgtcgtcgccatcgccgccgtgttcgggctgcagttcttccagcaggggtcgctcccgggcccgttgccgtcggagcagtgctttggctgagaatgcatggccgatgctgtggatcgtgtgagactcggtctagtgcgtgttcctggttcagattgtaccctgaaatcggtttgaccaagcattcgaagcatgtaattgctctgagcgttctcgtcttcaagtttttttttttagaaagaagaatcgtccctcttcccagcttcactcaaaatctccaacccactccctccaaaaaaaatcttaaagggtgtatacatttgagtgtacatgcctgtaggtatgaaatcactgacaaagagttacctagctttgatgaaattgcaagcataatttagaatttgatagaagcggtcatagctaggggtgaaccacgagaagttagagcaagagccctacgtaggtatcgtaaacatcctcattgtatcatgacattgaagcagaagaaaaggagtgggggttggagattttggtagaaactgaggagaggactgattatggaagaattggctgaaagaactagaccttaaaagtatgtcgtaggtttgaggtaaaggttcgaatgaaagacccaaaacatgcgacactacacatatcgacaaggaaagtaaaggttaaaggttcgatacaaggtcacttgggcggttgggcccaatacaagcgacgagatgttctaaaacattacgaggggctaagcagcaaaacccacgtagaaggatctcgtcctgaaggctgtcctagccggtgtcatcttgacgtgtcaccctccgcaaggctgccacccttgtgtgcatgctagagaggaaccgtcaagcaacagtaaccccccgatgtctccccaacgacatcgatggttgtaaaagagaaagcattttgtatatgaggtcagatgaatggttgaatgcaatccccctcatgagaggcttgttcctaactgtccataaggaccaagcaagagcagtaaacgtggtcattaccttgagttcccgtaaccaaagagtggaaatctgcaaagcccgccggcttccaggatgccatggttgctcttcgaacaacaatccaaacaaagtgaaccactacacatcgaaagaaaacgtggtcacatgtttcatcctgtctgcgccacacacacttgccatcggcaagtccatgacactagaacctgatccccactacggatgtggtctctagcaacttgccaaagggaatcttgattttagctggggtacgcgctttgtagacatccatagtgttgcaaactacaaattattgaaaatctctttgtataaggtgcccgtgtataaatgacctgaaggctcaagtttccaactatgtgtacctagaccatcggagatgctcctccctaccaaggctcccaccaatctgtccctttgtaccaagtccaacgaatctgatgattacttaaaacgggggacccatgtgccccaacccaaacatgagaaacttttgcatcgggcaactccacaatagcaaagagccaagggaacctagtcacgaaatcacgtacggccttcatggacctcaaaattcataccaagatacaaaaaatgcaaaatcttgccaacaaccttggaaaattgggatttttaagtcgaatgaactatttccactctatcatcagaaacatacttgtctgtaaaaatatggatctaaagcccccccttggcttggagcaacttcaaggcccgcttggccataagacaccagttcataactctagtgttgaacatatgtagctataccagctccgccaaggttccactctaaccgtgaccttgtctaccaaagagttaacatcaacaacgtgaactccctatccgcaacagggagaccaagatacacgaatagggttggagcccaacttacaaatcaccatttgagcggctctcatctaactctcaaggttgggccctatgcnnnnnnnnnnnnnnnnnnnnnnnnnnnnnnnnnnnnnnnnnnnnnnnnnnnnnnnnnnnnnnnnnnnnnnnnnnnnaatggtcgccatcagatcgtacttaatacggatgagtgtatagtgcagtggccagctcaatacattttttcgttaatacctacatgtgtcacacaattcctaatgttgtgaagtaggttataccgaaatatattgtggtgcagcgactagttcgagaaatgcaagtgggctcaggggtatgatggtcattactccaaaaggtgacaacatattaggcctggtataaggtcatccgactgtagtggtatatatgtaactaatgcacagatttagtgatatgtgtaagagagggaaaatttaactcacgtttatgcacatagcaaaatccccgttgaaataactttgtgaacaactgtgtctcccccgagaaaaagatcatctagtttggctcgaacaaaactcattataagaatgatgtcgcgccaagcaaacacaaatccaatgaccaattgcatgaaaaacgaggaaaggctcccctcccctcccgtgtcgctctcgcgagcgaccggggggaaccctagccgccacaacccannnnnnnnnnnnnnnnnnnnnnnnnnnnnngccgcccagcgacgccggcgggcgaagcccggccggtgggggcggcggcggggcctcttcttcctccccctcgtgctccgcggatggcgcgagacggccggtcgagtgggggcgccgg

SEQ ID NO: 27 - DNA, 29225 bp, Artificial Sequence
  Scaffold 1893791
cttctttaattacaaattgattgcaacatcgtgttagtatgtgatttctcacatctggttgtaatatttgtgaagacgtgcattgcacgtgcacttggaagcgggcccgtggcccgcgccggacggcgccgacgctgacccgggccacctcctccgcgtattcttggagctgtggctggccgatttacatgaaattaattccctcagttcttgtggcaaatataatacacataatccatattgttatgcactagcgtgtgtgtgtgaaatagatggattatggtcccgtacccaataagatggatatgtgtgtgtgttagagagagggagagggggagagagagtgaggaagagggagggagtgtgtgtgtgagaggatttgatggtaaaaaaggtcgccaatgtcgtaatattgaactctttaagttaacgtggccccgttgcaacgcacgggcgttcttctaataactgttgttgcacaattaaacatgtccagtggcattaggcgcatccatggtgttcacttaactaaactaatggttaatcaagtaacacactccaatgaatgcttccattcattattatagtaatatatatcgtgcttgcacggaacttgttgttttggcataactaagtaaaggtaggtgctcccacagaaattaatgatttgggtaaacaagtccaaagtcaaacacaactctctaaaggaatctccacatcaaaacaatggattttgattttgctccagctccatgttccatggggaaaaattatgctactaccattttaatactatatcattttataaaatcattgcttaaagtcaatgaaggcttatattgtggtatcaaggactaaatgtcccctgcacagattcgttgtgctagtcctgactcctccttgtccttcctgtttcctgtcgatagagcgagattcaaccctcctgtccacagcaatggctgctactgctgcactgatatttgccgggaagtcggttgcgaccccggccatctcattcatcatgaagaaggcattcggctatctcagtgagaggtaccagcctaaggatctagagcagctcaagaataatctgtcaccgaagctcaagcagatccaagcggtgtatgatgctgttgatcgtcaggagatcagcgagcagagcgatgcactggatgagtggctctggcgattccgtgatgcattcgaggaggctgaggatgcacttgatgagatagactactacaagcttgaagaagaggcagaagcccacaacctagaacaggtgcgtaattcagtcacaaaattctacaaagaaaaggttgttggcaagtttgcaaggatgatttctgagggtaagatggtaaagaagctgagggaggccgtagagaagttagacagtgttgctcaagatgtgggaaacttccttcagcttttatgccgtgttgataatcttgccctgcaagatcatgctgaaagcattgaacaccagactagctccgctttggtgcctaatgagacctttggccgtgacagtgagaagaaccaggttatgaggtggttgactgataatatatgtaataatcgagtcccgatttttacaataatcggaattggaggtataggaaagacaacccttgctcagattgtgtgcaaagaattgaaaggttcagcacactttgactgtgttttgtgggtacatgtttctggtagtgttttcagttcaacaaggataatgaaaaagatcttggaggcagttacaaaagagaagcctaatgctaatactttggatgcattgcaacagattctcacggacaaacttgtccttaagaaagttctgcttattttggatgatgtttgggaagataacaaaatgagtgaatgggaaacattaatggctcctttgcggagtatgcagagaggaagcaagatcctggtgacaacccgaatgaggtctgtggcagatatggttgcaggtgtgatgagaagtagaaatgattatttgcacttagatggattaaatgaagatgaaaattttatgctcttcaagaagtatgcatttgatggtttgaatttggaagataatgcacacctcttgccaattgctgaaaatatagcaaaaaagtttcatggctgtcctttggtgacaaagattgcaggtggccatctacggagcaacgtaagtgatcagcattgggaggacttgcacagacaattagaacatttagaaggaagaactgatgctatcgtcacaactgttcttcgatcgagctaccatcatctacctgagcacttacagctttgttttagatactgtagcatatttccaaaaggtcacaagtttaagaaggaagacatagtgaaaatgtggatgggttcagggctgatcctgcgaactgaaggtgggaccgaaaggctagaagacatgggaggaagatactttgtgcagttggcaagaaagtcattctttacttttgtgccaacagtaaatccttaccagaaatactgcacggagtactatgtcatgcatgatttattgcatgagttgtcaagtaatgtttctatcggtgaatgcctaagacttgaatccggtggtttcctgcatcatatgtgtacagttagacacttatggatagcaaacttcagcaagttatcatgtgaggagatcaaggccatttcctgctttaagagtttgcgtacactcgtcatggaagactcttatcatgtcagtgctggtcatgtagatgcactgcaggaagtcataaaaactgtcaagtgcttgcggttattgagcttaaaagggataaccaagttctatttcccaaatgaagttgctaataagcaccttcgttatatctctgtctctaggatggaggaaatacatggactttctaagctctatcatttacaagtacttactgcagcgaaaagaataggtacaacatcagaacaagtggagaatatggaaaacctgtttcatctgcggtatgtgtcctatggtagtaatggatttggtgagtttcctgttggcagattaacttcactgcaagagttgtataacttcaaaattcagtcagtggaaggttaccgaataagttcattaaagaatttgacaagcctttgcaagctacaaatgtgcaaccttgagaatgttggcagtcatgaagaggttattgaggccaagctaaatgagaaatcctatcttgggtcactttcacttaactggtctgaaactaatgatgttccaatcgaagacagcctggttcttgataaacttgagccacatgctcgtcttgaaaatcttgaaattgcaggatatagtggtgtccgattcccatcttggataaatgatccccctctggtcaatatggtgtcacttgagctgagacagtgcaaaaattgggtgtacctcccgtctcttggaaatctacagttactcaagcatctcgagttgcaaaaacttactggattgaaacagattgggcaatcatctgctgattcctttcctcaaaatctgaaaaccctagtggtggaaggatgccagggattaaggaaactaccacttctacctctgactttgatgcagctagaaataagtaatgttggattggacatcctcccgggaattgttgcccaccatgataacattggttctgcggccatgccacccaagctagtatcagtcattatcagcaattgttcaaatttgactacgttggcagagagctttctaatgcgcgaacactatatctgcactcttcggatcctaaagattgttgactgtaaaaaactaatccatgctcctttatcatttgggagcatgaatgatcttacagaatttcgtattgggtgctgttactcattgagaatgatgcagaaggttgatggtggactactcccttgcacgcttaaggaactctctatggtgcaatgtggtgacctccaacttcctctgctggattcactggttggtctgaccaatcttacctcactgagtttgtgcaactgctccagggtgaagtctcttccatcatcagaggtgttccggagtctcacagcactgcgagagatggttatcacaaactgcattttcttgtcatccttgggtgggcttggagctctttcatatctcagttggctagaaattacagactgtggccaacttctggtggcagcacaatcaggtgaaatgaatggacattcattggacgaggtctccttgaaggtctactcgctctggatccaaaccccttccatgttgcatatggagccactgagtagattgtgtaacacaaaaaacttgattatctccgttggctgtggcacaatatctcagcaatggatgagacaaaatagcaggtcccttgagaccctggagatattgaagccagagattatgttatggctagaaggttttcactctctcaagaaactggagtttgatgtgattccctgtcgcctcccgtttcctggtctgccctcttcgctggaatccttcattatcagaaaatgtgatccagaggtggcggaaagctggaaaaagaaagagagctttcaatggaacaagatttcccgcatcggtcatgtaagaataggtattaccccgcttctcatcactaagttcttccatctcatcatcacctgcaatctagttgtcagaccaatagatgtattcctatcttaggtactgtttccatgtattaaccagaattatctcctgtcagattgtgatctgggcatcagtttaactatgtgttaactttgcaggagacacaaactactatttgggtcaggagagacgtgttacaaatttggtgaacacagctacccattttgatagctgtggttctctacgaggaaagagaactaaaaggtaccccaccatttgtttgtagtcaatggagtacatgtcatttcttgcttcgatgttataagcctatgtcattgtgttgtacatataggtgaattccaagctggttatctctgctgcctggagattcaagaaacaagtcatggaaagcgacgtcctctcattttcacgctgcaagtgcaactggagggagaagaagtaagaacatcatgctgctctgttcccaaatgctctgttccactgttggcccctcccctctcatctcaggctagctgctggcgacaaggttggtgtgggtctcgtactcccacgactgtacaaatgtagttgggatctagtactttctagtaggttttcttttcccgtgttgttttggggtcgaccccgttgtagaactagctgactgtcatccgacagccgtctcttgtaacaacctaacgagcctctaggattttgtcgatattgaaagttatatgtgtgctataatagcggtatagatatcaccatacgtttgttcgatatgagatttatacaattgtatagcagcatataagactggacagaaaaagcgaaagctctgtagacataaacacaaatgcttggtcggaacttaggctttccgggcattattcaatttctccctgattgggaagtatggatcattaaaatagaaaatggaaatccttgtgcacataaacacaaacacctggtggtcaggagtttagactgcaaggtgttattcagtttaggttggatcgtaaggcacagatcaacaagaaacactggctctactatcaggatcactcttcgttacctgatttccagcattgtatggttgaacgatgtgcccagtgcgtgacccaaattccagtaaggctcctgcaccaccgccagcaatcccgcctctgtcctccacggaatggtgcagtgggcgaggaagggcgacgcccggcgcaccgggttcgtgttccacgcgccgagagaggctcgatggtgccaggaatgtcgcgagatctgagatgaccggattaaagaaccgggtggcgaggggggaggggctactggggactgcagagggagaggcgactgaaagggcggggattaagagtatctccagccgcgcctccaacaggtcctccccaaaaatcagcccagtcgcgtccccagtaacctgttttttgccggcttgggccgaaattggcgctgacaaacccaaaccaaacccgacgcgctggggggcgcctggggcgctggcacaagcgaaaaggagcatggggccgctctgtcggcgagtcgagagcctcttcccgccgtttcttcccgcttttctcccacttccctctcattctttccattcctctcgccaatctccctcccgctcgccttccagctagccgccatgccgctgaagaagtacgtgatcccccgcgccgtgacagctgcggctgccatcgtcgcccagccgaagcagaggaagccgagggcgccgccgtccaagccaccgggcctgaccaacgccgactggagggcagaagttcagcgacgggaggctgtcaccgccgaccggcggaacagggccaacgcaaaaaaggcccgggacagcgcggcgcgtgcggctgcggctgcggcagatcaagccgaggcgtctcgcgtggggatgatgaatccacccggcggccacgcccagcacgcgtcctggagccagcaaagcgtcggctcttcggccggcttttcatcgtcgccgcaaccatgtggatgcacgccgtcgccgcgctacgccgactgggacgcgcacggtgggttcaaccccaacgtcacctttccccatggacacccggcccagcgcacgccctcgcccgcccggtacgtctcgatgctctagttcgtgtcggttgtcgggtcgagggactttccacgcttcggcgagacattctttctccttggacgcccacttgatgcgcggctcgcccgtcctggccgcccgcttcttcttattgctcctcctgccggaacagtcgccggttcctcctcctcctcctcctcctcctcctcctcctgctcctcctcgccgtactcgtgctcgccgtccacgcctccgctgaggtccaaggagaaagaatggtggcgccgctctccgggcaagctgcgacctcctcgacgatcccatgccatttgttgcacgccggtctcccgcttctcttcgccgtgtgcgcccgccaactgtttgttcatcggcgcagctagtgcgcatgttcgtcatgtatcaccaggacaacaacgaccaaggattcaagtacctccatgtcttcaagcggatcgacaagtgcgagaagtgggcggaagtccggcacaccctcgccaaggccaaggagacctacaggccggacacgccgacgccgggcgcgtcagaagggcggccggacggcaacaaaggggccaagaaggggaaacacgccgacgcggctaccgcgcgagtgcaggagtccatcgagaattgcctcgcggacgcacaagcccgggcggccctgcgtgaagagaagaccgaggcgcggtggtcggcattgatgacgaacagcgccgttaagctcgacctgctccggaccaacgtcgccgcgaagaagaggaacaccgacctggcttttctgatgggcggggcggacatgctccagagcaacgacgggaagctcaaggcgtggtacatggtggagcgcggcctcatcctgaaccagctgccgacgagggcgccgccaactcccgcgcccatgcccacgccgccgccaaagcccgagtgatgatgcctccacgacgcccagcagcaccgaagccgcgccgacgccgcccagcacagaagcagcgccaacgccggaggccgcccccgccgagtgatgcacacgtctagacttgtggcgttcttttttttgtacaccggactatttattatccgatcgccgaactatggcctacgatcgccggactgtggtggcctatgatcgccggacttgtggcatcttttgtgatgagcggaaacgaccaattttgaaattgccgcgtcctgggggtggcgtctgggggcgtgactgggagctaggtggcccgcaagggccaatctagcgtcggttcgcccccaggctgctctttttaggcgccctgggggggcgaacggctggagatgctctaatggattagaacgcctctagcagatcccctataatctcgtactgtaaaacgatatacaacttccggtaaaacgtctttttatactacgtttttacgatatgacatgtgttccggtagaatagattccataattgaacctatctgtggttggatggttagatgaacagtgatatccccaacctatcaagttcaaattctgatgcccgcatttatcctggatttatttcaggattttcggcgacacgcgttcagtgaaacgggatgttcccgtcgactacgaggctgctagggtgactttgtaaaatttaaagacgatttgccggttcaatctctcggagatgctcataggagtagagtgtgcatgtatgttttcatagggatgagtgtatgcgcgtatatatgagcgcggcaaggtggggttcttcaggttcgagaacaaggtcgcggaggacgccgacatctgtgtgctcactcgccggtgagggagagcgccagagtggctgactcacctggggccgagtcggagcgcgacgcgttcgggctcttgtgcaggcgctagctctggatccagagctccgagcgctgccgcctacgcgcgtgtgccggtccatccatgttgtgccgcctggcagcacacttcccgggcattctcgagctcagtctctccccgtcgtcgttccactcgttctaccccagtgttatcgacgataatttggacgtcattgcagggggttttgcaatctatgtcgacagctcgcggccggcggccggaagaccgtggcgggaaccgaaagtttcttcccgtcaactgttttttgttttgcaggtccatgtaaaaagatggaggggtccgatagatatagcggaataggcccaaactatgcatgatcccgcaagaaaatttattgggtgaatgattttatagagtccgttcgggatgggaaatcggccccatccgctatatcggcggttattatgacggatgaaccggtttccatgatatggagacactcttaggatgccggcgtacgtacgatcgaactggcagtctgggaagtgatgcaggggtagattcacgaaatgcatagcgacaaagggggaagagaagagtcgagatgttcttgccggtggttggaggtagctgcgcggcacagactccctgtgaagcacgtgcacgtgccaaatccaaaaatgtacctatattacacgtggaaggatccagtacattctaggatttgatctgatggccagcagctcttggcagtccgatgtagcacgcggatccatccaacttaatcatgaaatttattcatatgctatgcatagggtacggatattgtagactagatactccctccgtcctataatacaaaaacgctagaagattacggtacggtgttgttgagatttttattaaaaaatgttcctttttacgggaacaaaagatgatgaagtatatatttttttataatgcggtattttgatcgagtcaatatggccgccgtgtgagagtctgtcaatgggtacgagaagagttccagcaggcctgcagagcctcatcggatatatgtcgcctacacgcgctaggcattacttcctaatgagcaccgcttgtttttttggaaccagtggaaccacggcctgccccctttgctaaacgtacactctgtcttgggttttgacacttgcaacctctttttgtctcgtgcgtcattttggccgggcgaagatctgaacatgtgaacagatatgtgaggtatgctgatttgtggtagatgtttgtcgtgcatagatcactcgtcaacaccgccgggacactgcagccgaaatgccctctaataggctaaccaagaacatgtcgtctttgtgcatgtgcacattgcaatcctgcatgccgatggatttcaccagatccacagaaatcccgaggcttctggaagcgctagcctaatctctactcttataaaaagaagagttcgttatgatggtgcgcctgccatcttgtaatatagaccgcccgatctatatctaatggataggaagaaaactatgtcaatttacccgcactccttttcacatttgcagatacggccttccctcgtttatccttttcttccataagataaactacttatataaatgcatcttcatgttccgtgtaacgcacgggcatcttgctagtcttccaaaaagaccgagctggttaggcgtgccagtaggatccaacagcgtgggatcctgagccacagactgtcatgcctgacttacgtgccatcttacatggtactccttcatccccttcggcacatcctcgtcactcatgctcttggctgtgccatgtcatcatacacttgaatatgcgtacctttttcagattgctcgaatttgtgtactagataatatatgaggcatggattgtgttatttgctgtatcacactccaatgttgtcctggtcgatggccgtccgacagggcttgttgtcggccgaggccgaggcctcgcgcttggtgccggggtaggagggccgttcgccgatgaggtgctcgatgcagcgcgggatgtggtactcctggggcagcctgacggccaagaaggcggcctcgacgcgggccaaggcctcgggctaggtggtggggtgacacccctcacgccggcgccaacgaggccccctcgcccaccccaccaccagttaggatagccactcctcccgcgctggtcgccggccacggccaggaacctgctccactccttggccaccgttcgctcactgcttctcgggctaggttgcccgcccgccgcatcatagtcatcccgtccccaggtatttccttccacgcccgcgcgctgtctgttattgggcatggcgtgtgcccagcctcggattcccgtctacctccctcctcgaccgacacggtttgggtcacgccgccgttggcggccccctgtttctccgcgctcatgtccttgtttttctgcgcgcctcccatgcgcctgcgtgcctcgcgggttgaagacctggtttttgccgtcctggtggtcagcccggctgcgtcggcgacggtgcctctatcaggctcggggtccaccccacccttgccgcggaccgcgacgatgcctgttccgttagggccgctgcctccgcccacctcccacccaccgcatttacgcggggcttcatggcgacgggaaagcgcggtagcctttcggcttgccggcgtctacccctccctaggtttggcctccccggtctcctctcccggccccaccctgatgacgtttcgcccccccccccccattcgtccatgcccccctgccgcttacctggaggcgagttggtcgcggatttggaggcgggggagtttaatcccgctttgccgcttccgctttgctctgtctcttctgccagtgacactgagaagtcccgcggcgcccgttccatctacattgactccccgtctgccccctgtacgggggctgaattcctctcccctccccgcccctcctctgcccccgaggaacggccttatctccatgcccttctctcccctcagccccctcccgcccctctccatcgcctcgcccctccccctcctttcgctccgtgggtgcttccggtgcctctccaccctgcacttcgtgaaggactgccgggatccggtctggtgtcgtcggtgccgctagtccgggcaccgtgctcgctcccgccgctgccccatggctcccccccgccctgcccccacccctcacgctgccgctcccctgccccgcaccaccccgcctccgcatccccaccgccgccgccccatccagccacccctcacccctccagactgcgccgtctcgccgctgcggctccgatgcccctgcctcgctcctcggggtcggaggcgggtgggagcattgcctcctcctcccgccctcgctccccacccagcgtttgtgatgtctctaccacgggggtcgtccggtccccccctcccccctcccctcccgctctggttgggcacccggagtctgcgtcctcccccgcggggatccctcccgaactcctcgccccgcgggatcgggtgtcgtccagcgacacccgtctctcctccgcctcagacgtgtcgtctggctacagcggcccctccctcgcggcggagtccgctcgccctgatgccattgatgtcttcatgcccgccggtgactacgaggccgcccttcgcctcgcggtggtgaccattgagccccccaatgccttctccaacagcacctccgcggtgcatgcggccctcctccgcgaccttggccacctctccgtcgagacggtgccgtcctcggtgggcgtcctttatctccgcttcgcctcttggcttgatcgcgaggaggccatgcgcgagcaacctttcaactaccaggacgcccgcatcgaccttcatcgggaagagcactttgggcgggtgccgcagcgtgcctgctcttgtgccctcctggccgccatgggtttccctgccgagcacctcatgccggagggcatccctattacgttctccgggtttggcaaagtgctggagatcgaccccttggtcctctctgggcgcgagctagccacggtcaaggtggtggtgctcctggagcagacccgcgacgtcccttgcgacgtctggccgtgtgggggaccgtggccctcccgcgtcgtgtccgtggagccgattagggtttgggcgatggacgcctccttccgcccagacggctcctacatccctctcttcgcccagccgcctccaccgttcgcccacaaccacccctcctcccttcttgggcgccccgttttccgccccccccccccgttgggccgccgcgtccgcctcgcaccgctggtggtggccatgggggtggcaagctcgactctgtcctccgggtcctgggcgccccgccccttcccagggtggtgtcccctacgcctggaccctggctggggcaccgctacctgtcgggctccccgtctgtcggctctcctccgtctgcacgctcctctgtgcgcatcactgagctcgctcccggcgacgcgggcgcggaggacgcggtgccccccccccctgccgagtgacgtctacgacgacggggggcgccgcagtgcccggctggttctcctcgaacccagcatgcacgtgaacatggaggccaaggcgatcaagcagcgggccctccgtgactcccttgttgggtgctccccccgtctccaagctcgcgccgcgcgcgacaagctcattgacgccgtcgtggctccgttgggggggcgttccgtggctgggctcagggcggccacggcgatcaagcgtcccggtgctgcccccgaagatgtgtagttgctgcgtgcgtatctgccccccccccctcccccgcacctgcggtgctgcctcccagtttctcctcgggtgtttgaggattcctgtttgtgttgtttttctgtcctttctctccacttgtggtgcctcctcctgttatggataacaccgcgtttcgtaaactgtccgtgctgtgttggaacgtgcagggcttgggcgacccggacaagtgcgggcttgtctgggacgcggtgtgtgccgccgaccctggcatcacgtgcatccaggagaccaaacttgcgtcggtggacgccgggaagtgtcgttctttcctcccttctcgtctttccctttacgccgttctcgacgctaatgggagccgcggcggcatcctctccgcctgggaccccgtctcctatcgcctcatctcctccctcgcccctgaattctccctcaccgtcatcctcgaatccgtcgcgtccgccctcaccttttcgctcaccaacgtctatgccccctgtgaacacgcgagggctgctgatcttgttgccgacctctccacggtcgcggcagccatcaccgggccctggctcgttttgggcaatttcaacctaatccgcttcccccacgaaaataacaactctaacttcaacgctccccaggcggcccttttcaatggcctgatcaactctctgtcctggtttgagctccctctctcggaccgccttttcacctggatgaacaaacgctcccccccgaccttggctcatctcgatcgggcctttttcaacaacgattgggacgtcgttttccccgactcctctctgagctcccgtccccgcaccacctccgatcactttcccctgctggtcatagcctccactcgcatccccgcctcctccaggttcttcttcgagcgcgcctggctcctcaaccctctcttcctcccctcgatcctcacctcctagtctagggctggcgggctatgctgtgcggtgggtaacttggcgtccaagaaaaaagtggctagggctgcggccaaggtttggaaaaggcggcacaaatttattcctacagccgataacgactgcaagtttgttattgacctgtttgattttctggaggaatttcgctctctttcttcagaggaagatctgttgcgaggagatgcccgtctttgccttgcgtcgattcgtcgccaatgtattttctggaggcagagggggaaatgcaaggcggttcggttcggcgacgagaacacccgttatttccacaccctggcgtcgcagcgcaggcgcgggaatgcgatccgggcgctctcggtcgacggtgcggaggtcgtgtcgcacaatggcaaggcggaggcactgcggtgcttttacgcctcgctgctggggcgccccagctccgcctcctgggggttcgacctcgacctgctctactccaacgcccccagggtggacgggggcgcgctcgtcgccctgtttggtcgtgatgaggtcaaggctgcggtgttcaagctggacggggggagtgcgccgggccccgacgggttcggccctgccttctaccaggccgcctggccggctgtcgagggcgacctgcaggccctgttcgacgggcttcacgccggggcggtccaccttgatgggatcaacagggcctacattgccctcctgcccaagaaggaggggttgcctggccccggcgatttccgtcccgtctccctacagaacggggacgtgaagatcctctgccgtggtctcacgacacgccttcagcgccagatcggggctctcatcgacgaagactagtccggcttcctggccgggcgcagcattgcggaaaacttcgcgtacgccgctgagcttgtgcagtgctgtcaccggcggtcttccccgaccctcgtccacaagcttgattttgcgaaagccttggactccattgactggaggagcctccgtcggatcatgcgggctcgtggcttccccgagctttggtgcgactggatggacgccattttccagtcctctcgctcggccgtcctcctcaacggcgtgccggggcggtggttcgcgatccggtgcgggctgcgccagggggacccgatctccccctacctttttctcctggtggccgacgtcctccagcgcatgatccggcatgatggtgttctgatgcacccgttggtggacggcgagccctcggtcgtgctccagtacgctgacgacaccctcatcgtcatgcgtgccgacccggcgggggctgtccgtctccgggccatcctggacctgttcgccgctgcaaccggcctcaccatcaactaccacaagagcacgctcgtccccatccatgcggacgccgcgacgatcgccgtggcggtggccgccatccagtgtacggtgggggcgtttcctcaggcctacctcgggctcccgctgtccgtggacaagctcaagctctcgacttcgcccccatgattactaaggtggatcggtacctggctgggtggcgttcccgcttgctatccccctcagggaggctcgtgctgatcaacgccgtcctcgatgccatcccgtcctacgccatgtctgccccgcgcctcccgcccaaggtcgtggctgcgctcgactccctccgccgctccttcctctggaacgtggcggaccgcgcctcgggtgcccagtgcttggttgcctggtccaaggtttgccgatcgagggtggagggcgggctgggggtgcgggatatctcagctcagaatgactgcctcctgctcaaactgctgcaccgggtccatgcaacggcgcccgctcggtgggcgcggtggctctggaaggatcaccgcgggctctcgctgcttggcgctggcgcggccgcggatagaggaccgcactgggcggacttgctggcgcttccccccctctaccgtgggctcaccagggttgccattggggcgggggaggaaacctccttctggcacgactgctggatgccccccggcccctgcgttgtgccttcccggcccttttctcgcacgcctccctgcctgaggccactgttgcccaggtgcggcgggaggggctgccggccctcctggtcccgcgtctgacccgcgtcgctgcccgggagctggccgaggtgctctcattgctgcgtgcctgccctgccacacccgctcccgacgggcggcgcgccgtcctctgtggcaccccccgtggtgctctctcgacaagatcggcgtacgccctgcttcgcttcggcggcgcctcgtcgccggcagccggctttctgtggagctcggctgttccttcccgggtaaaattcttcgcctggttgctctccctggccaggatccacacccgggacgtccttctccgcaaatccatcgtcgacgcccctggggctgcctgcccgtgctgtccggcccttctggagacggccgaccatctcttctttgagtgtggggtggccgttcgtttcaggcgctgcatcggtgttgacccgcgtgccgggagggcccgtggcctccatctcttcgacgtccgggcgacggtgggggaggcctcaccgaccgctttcctcctcctctgcgtatggcacctctggaaacggaggaatggtgtggtgttccgaggggaaaacccctctctgagtgctaccctcaaatgctgtcgggatgacgcggtgctctggcggggtaggttccgcgaggaggatcgtggtcacatagacgcctggcttctggcacttgctgcaccgcgaggctgatcccgtggcaaaaccctcccccctccccccccccccctcttatctttgtacatgtttctggttgtaatttgttgtccgcgcgtgtcgttccgaccgcgccccccctgtatctgctgtttggtgggaatataagattcaggtgggggagttctctcccccccggtgaaaattaaaaaaaaaacactccaatgtttcctcaatttttgtaatcttgcacaaggatgagaacatgtatctatttgaggtaacaaggggcgtgctatgcgtcggtcgactgatctttttgaaagattggtcgagtcgcaagctgtcggatatggcttcatcatgcggccaagcagcatcctcccttagtgcaacagagctgctgttgcagaaatctttgcaacagagatcttgttgcagaatttttttacaacagaagtctttttaaaaaaaaaaattagccttcacattgttggaacatatgtgatgttgcaacaaattttgaaatgaagatgatgtttcagaagacgacgctgccgccattcctgacgcatgtcgcagcaacaccatcaccatttgcaattccgccgttgcaattgcaacaaggaggcagacggtgatggtcggtggcggctcgtccacgaccccaagttgcgaacgtcgtcgggcatcactatggcttacaaatagccatgctctgcttgtagcagcgagggcgcgcggcagccgaccttgcaccacggagggggaaaagccatggcgtggggacggagctcgcaccaacccgaggtcgcattgcagcaacgagctccgcctagcacgctgccagcagcctcgtctggttgagatgagccgtgcaatcgcgacaacaagcacaacatacaaccgcggcgaggtgaagattttttttgggaacaccgaacgtggtgtggtgtggcttagattggataagtcagggacaccaactcacaactttgagatactgttgtactactaatcagaatccttgtcgcagcttcgtttctatattaagcggaagtattaaattgcaaacacaagccgaccttagctcagttggtagagcggaggactgtagtgttgcagataaatccttaggtcgctggttcgaatccggcaggtcggaatttggtattttgcccgtcatctttttttctctttcttcttttttaccatctgttgactgtccaacgaaccccacctgaatctgcttccccagcctccgctgccgacgacagccacaacgagacaggaccaaaattaatcccctgctctccttttttgaaatgaaaggggttcccctcttccccaactttattaagctaaagcatagcaagcagactctttaacagctctcggcgacaaccaaagtagctgccacagacaaacatcatagggttcagagctaccccgttataaggggttaggatcctctgcagtactgtacggtgctgtacagtcactgccatgtgggacctggccccacatgtcatcgacactacagcaccctacggtactgcagaggatctcaaccccgttataaggacaagagagaagcgcaagaagaacagtttccagttgaagcacacaaaaacagcactctccctatccaaattccaaaatgatgcacgccaagctatcctaatctatttcccttgctctcttcagtttggaaccaaattaaatcacagcccctttgctccgttcagtttgacatatataaatcccacacatcttggcatgatttggatcttacaagactttgtgagttatcaataatacaaatgaaccataattttgacggggaacattcattactggcacacaaaatatatctaggactgaatcttagtgtattatttctgaaaatacagtggcacatggaatatctagaacattggctaacaaaatagaaagtacatcatttaatcatggtgagaatatggaatcatctatatcttcaagactttaacactagctggtacatattaaaagatcagtcaaacttgtcaaggtttcgtatccttgagagcctacttcatttggtccaaaatcctgtttcttattactgaataatcaagtgttggcatgctctctttttctttctgcagatgcagatggtcttttcttctttatcttgtgttgcctatcaagccaagttcttgttttttttttggggtttctgttctgaacctcttttttctttaggcgtgcatcactccacaattcaattgatgcttgaggagtcacctgaacatcacatctctcttccggactagttgtgcgtacaccaaatcgctctttgacttgcttaattagtaaccctgtcaagtgcatttttcaatcaaaatgcaacactcttcagagcttgtatgtctgatgcactaatgcaagttctctttattctcagagcagtgagaaaacaaatgagattaaggtagacatatgaagagttgtgtggaaatttctgggttccttctcccattgctagctacagagtagggtacatatatgtacactagtgggcctttgggccacacacacacacatacacacacagcccaacactccccctcaagatggatgatagatatctatcattcccatcttgttacatgctaaattacattctttgacacctaaacccttagttagactatctgctacttggttccctgagcttacataatttaattctattataccctcatctaacttctctttaataaagaagtgatcaatctccacatgttttgttctatcatgctggactgggttgttggctatgttgatagctgatttattatcgcaccacaccttcacaggccccttctcatcactttcagttctgttagaagatttcttacccacaacatttcactaaggcctaatgacatagccctgtattccgcttcagccgtcgatcttgatacaactgattgcttcttgcttctccatgacacaaggttccctccaacaaacacacaatatccggaagtagatcttctataatcaagacagcttgcccaatcagcatcactataaccatctacatttaaatggccattcttcttaaaccatagccccttccctggactaccttttagatatcgcaagatatggtgtactgcatctagatggccactcctaggatcatgcatgtatctgcttaccacactcacagcataggaaatgtcaggtcttgtgtgtcataagtataagagacgcccaacaagcctttgataattctccctatccactggttctcctgactgcgcagaaagcttgtggttttgatcaataggtgttgatgcagcccgacatccaagcatacctgtgccactaagtaagtccagaacatactttctttgagagagaactatcccttttggagaccttgccatttcaatgcctaggaagtatctaaggtggccaagatctttcacctcaaattccttgcttgggttcttcttcaatcgcaatatctctatgtcatcatctcctgtgattatgatatcatccacatatactgcaaggattgtaatcctacgctctgcgtgtcgatagaacaccgtgtgatcaccattgcattgcttataccccatatgacataccgcatgcctaaacctgtcaaaccacgctcgtggtgactgcttgagcccatatagtgactttctcaatctgcacacctttctggcggtcctaggagtggagaaaccaggcggaatctccatgtacacctcttcatgtaggtcgccatgcaagaaagcatttttaacatctaactgatgtaaaggccacccaaaattagtcgcgcaagagattaggatcctcactgtgctcatctttgccaccgatgcaaaagtctcatcatagtcaatcccatatgtttgactatatcctctagcaactagtcttgccttgtacctttcggttttcccttatggattctgcttcactgtgtatatccatttacaactaacagccttctttccctcaggaagatgtacaagttcccaagttctatttttttcaagggcattcaattcctcaatcatagcatcatgccactttggatcttgctttgcggttttccagtcttttggaatttccactgattgtagtcatgaaacaaaagctctatatgcaggggacaaagattcataagatacataattgcttatgtcatgctcaaagccataccttgatggaggctttccggccttgatgcgagttggcttccgcacagcaattggcaactcaagagagctatctttcccagatggagtgggtgtgttgcatggtgtatcagttgttgatggagtggaattgacaatatcacctatttcaggtccttcttgttctaccgattgtacctgctgctccaagtgtggcaactcaacatgctctacagtctgttgctgttctgcgagcaccttcctttggtttctcctcgtatacacatgtaggtttttttcttcatttactcgtctccatgcttgcttacttgttggttcattcacaggacatggaatggaaccaattactacctttgacctccttgcttcttcaccctcctcgctacttgattcatgttccccctctcgaccatcaccatcaacattagggggttcaagatcaaacaatgagctaaggtcagtcctctcaccataatatggctcagattctctgaacgtcacatccatgctcacaaatgtgcgtcgctcacttgggctccaacacttgtagcctttctgtcccgatgggtatccaataaagatgcacttcactgcacgtggatctagcttccccactgagggtctatgatccctaacaaaacaagtgcatccaaaaaccttgggtggaaccacaaatttgttctcacctagcagcatttcgcatggagactttgttccaatcactcttgatggcatgcgattaatgagatatgtagctgtcatcacagcctcactccataagaattttggcacgttcatcgtgtacatcaatgcccgagccacctctaagatgtggcgatttttcctttccgccactccattctgaggaggtgtatctggacaagaggtttgatgcaatataccttgtgctgacagaaaagcaccaaattccttattcacatactctgtcccattatctgtccggatcatttgaacttgtgtgttgaactgattcttcacataggcataaaaatccagaacatttgaacacctcatccttgtgcctcataaggtatacccatgtcatgcgagagtaacaatcaataaatgtaacaaagtacttcattccactaacagagataacaggacatgtccacacatctgaatgaacaagcacaaagggagatatactcctaatccccctatttacataagacttccttgtgtgtttgccaaactcacaagcgtcacacaaaagcttactcttatccaccccacacattacatcaggatatacttttctcattttatcaaaagacatatgtcccattctacaatgtagaagtatcacagtagcttctttctctcccatcatcactgctaacacggtagacgttgcggtgtttgtatcctcacgatccatgtaccatagcccattatgcctggttgcggtcccaagcttcctccatgttcgcctctcctgaattatacatattttccggtcaactattattcgacaatccaaatcgtctatcaaagcactcattgacacaagattgaccggaaaagcaggaacatgcaaaaccgatgaaagtttaataagtggtgtgcattgtattgtgccaacgcctttaacgggctgtgaggtgccatcggctgtttggatagtttccttacgtgtgggtggatgttgagtatatgactcaaactcattcgatgtgcccgcaacatgtttagatgcacctgaatcaaggatccaatctggttgtgatactagtgaggaagtagatgtgtgggcacaattaccttcattggcataagcaaagtgagcaaaatcaccaaatgtgatgtctccttggcctttattccccgcattctccatcttccttttcaacttcctcaactcttctaactcttttacagagaactcaactttgtcagaggattcatcttcatggaccgccacatttgctttgtgaccaatcctatatccttgacatctacctcctcttgttccacctcggccatttcctctccctcttccacgggtagcctcgcgcggggcatgacaatcacgactcaagtgccctgtctcaccacagttgaaacactccctggtctcactattccttactatgaaggcaggacgagatggagttgttatattgttcttcatcacctttagtctgacctcctcttgtgcaattgctgctatagcttcctccaaagtggggagagtgggttggtggaacatagtagcgcgtcttccctcaaattctgagttcaaacccttgaggaattggatcactcgcctacgttcaatccacttcttaacagtagatatgcaatctgcatgtggcaactcgagagggtcgaagtgatctagatcagcccataatcgctgcagctcagcgacatactccattacagtgtgctccccctgtctcagatcaccaactctctcttgtgtctccaccatcaacatcacattccctttcccagagtatagcttcgacagagttttccatacctcagcggcatttgagattgtctcaacagttgcagcaatgctcggagacagggaatttaacatccatgccaccaccaatgaattggtggtattccaattcctccattctgcactcgccttccccactggcttagtcgattctccttcaacaaagctctctaacccctttgtctttaggattagcaaagcccttcttgaccaacttaagtaatttcttaccccctctaacttaatatcattcggcatcaattcaaacttctgcacagtttcagcatgaggtatcatctctctaccagagggcgatccgcctccagtcttctctgtgagaagttgtgccaacttctcaagcacttgctggagtccttgattttcccccattgctgcagcagcactcaaatacacaggcaaaccgcagtacaagcctcaatacaaggctcaccttgtagtactggagcaagaagcacagcaaggtaccagacaaggcctcccagtcttgcagtacacctctcttctgtacacagcaagcagtctctgctttttcactgtcacaggcgaccaaatctaccctaagcagctccctccggattccccttctctgccttcttccacgagctgccttcttctgtctcaaccagcagcttgcctctcccgctccactacaggccaccagaagcaggggcgacactctcctccaacagctgctcctctcctgctccactccagaccaccaccagtacggggggctactctcctccagtagttgctcctctcagatcccagaccaccccaggacgctgctcttctctcccctcctgacctccaccgtccctctcgccgccggcggcgacgggggctacagcagccgcacccgcaatgacaccatgaagagttgtgtggaaatttctgggttccttctcccattgctagctacagagtagggtacatatatgtacactagtgggcctttgggccacacacacacatacacacacagcccaacaacatacaaagtagcaaactatgcaattcaacaagaccacaaggtatggacacatatgtcaagtcccgttgtttcttttagaaaaaacgtaagccattcaatccgtcgaatccttgttgataccccattatggagtcatcagttttcaaattaaactgatcacacaagaattttattcactaccgagggtaccttgatgacaacaagtactctgcttccaagctatactgctgactcgtttcctccatgttcgtacccttaatcgctggatacttcggcacatccatgtcatgcatcacgaagctatcatgtgcggccccaaggctctcgagtgtcaactccacttgcctcatggttggccggtggtctccttcaatcctcacgcatgccaccgccaacatagccacctcttcaacctccttgccgccttcttcaatgacctgaggatctagcacgcgaaccagcttgcctgctgctagcgaagcagtgaaatatgcggcaagggtttcctcctcggatgaccgatatgagcatggtttttcccttgtcaaaagctccatgagaaggacaccgaagctgtaaacgtcgctttttctcggtgagctgccccgagtagaagtacaaggggtctaggtacccaaatgtcccttggatagcggttgcggtctctgtttgatcgaccggaatgcacctcgaagctccaaagtctgacacctttgctatgagagtgtcatctaacaaaatgttttgggacttgatatccctatggactatagggaatgacacggccgagtgaaggtaggccagagctcttgcagtctcggttgcgatccttagccgatcttcccatgtcagggatggcgcgggttcttggacatgaagatgatggtaaagggtcccattggatatgaactcgtacaccagcaacggcacctccatctgaaggcaacacccaaagagcttcaccaggtttcgatggttgatctgcgagaggatggctacctcatttatgaactcatcaatttccctctggatcgcgaccttggacttcttgatcgccacgacatgcaggtctgacatgatcgctttgtagaccgtgccatgccctcctccaccgatctcgcgagctttgtcgaaattgtttgtggcctcttgtagctccaccaaggggatgatcatcctctcggcgatgtccgccttctgagacaccaattgttgcaacagatgcccccgattttgcttgaagaatttcttcttgagcatttctgccctccgttgcttcatctttcgggtcacaaaaatagcaccaagcaccatgattagaagggctgctccactgccaactccaatgccgacacttaatcgtgtagaatgtgcacaaatattgtgtttttgttgttaaggaagaatctatgagatagtacaaaacagagcatgaaccgatgctatctctggcgtgcaattttattggttttgtgctcacctagagaagatctgatgcatccatttcttatgcgtgggtcgccatgggcgccacgctatgccggtgccctccggccgtgttggtgcactcgccaaagcacatgcccagcagcgtgcactcgtcgacgtcctggcatccgccggcgaggtatggattgccctggtaaccgtccaggcaccggcacacgtagccgctgcggtagttgccggagacgttgtggcaggagattttttttcaaaactataactttttgtgcagcaaattcggaaactatagcactaaacgcgaaaaaatcaaaactatgaccccatcggcctcgcgctggccgaagaggttgttttcggcccgggtttggccgaaaaggacttttcgtccaggttttgaccgaagtagggctcggctgggccgaagaggtggtgttggtggcgggccggccgaaaatcgtagcttcggcccacgcgaggccgaagtgggctcttttcggccagcgggcggccgaagagctcttcggccaagagttgaccgaagagttcgggataaggctcgccaggccgtctccttcctctggctgctcgcactctgtttcctcctctctctctctctctcattcttctctgtaacctcacaagcccgcgccgatctccaccactttgcacccattttcacatccaagacacagaatagatagatcataccattctccaacagcctacggtatttttttgggtatgggatagttttttccgcgtttggagggaggagccatggtggggtggagaaggtgtggttgggaaggaggtggtggtgaggaggagcagctgctgtggacgaggaggtgcggcttggggggtgaccggagttgagcctccggtcgtcgagggggcggcgctgccgttgtcctgtggtgcaagtactccgcgaggtggccggtgccgctgagtgaaagagaggagcaagaagctagggacacacgcttcgaaggtataaccatgccatcacaaattttctctgaattgtatattttaattagtttagataagtcatattgtgaagtgcagtgttaatatatttgtggaggcattttagtgcatagttagtgtaacgggtaatattagtctttgttgtgattaatgagaggatgacaatgtctgacaggtgaaaatgtctgaatcagtaaatctgactgtttactatggcgctggtaatgttcgatataatgagttgggggttgatcttagcgagtttaaaaatggcgtcatgacactagctgacccagacagactggacattagacagttgaagtactggttgacaactagtttcggtctggatcttgaagtatgttctgtcagtattcatgcattgtggaccaaatcctgtaaaaatgtcaagtgggagttgatgccggtagataggagccagcattggttgtccctgttaagacgttgccgagaccgaagaatccacccatatgcacttgtgcaacctgtgccgaaggaggagaataccgtacaactccacagggggtatgaacccggccaaggcagtgaagtggctaacgagattgttttatccgggtcacaaccacaagatgtggatgctagccaacccgagaaagagtcggagtacgtgccacacaatgtttgtggtcctgatactaggcagagtagccagtcgataatattagctggttctggttttgctgatggggatgaggaagggtatgaaatgcagagggtgatggaggaagaggacgaggatggattggtggaggaactggattctgaaaattctgaggatgaagttgaggtaccgattccttctgcatgggagcaggacatatccaccggccttacggtgaatgatggccatgagactccatggcagtataatctgaaccaagtactaataggggctatgtttgatacaaagaaaaaattgaagtatgcggtgataaagtgggctatgtctacgcagagggttttcaagacacacatatcaagtccaacaaactataccgtgaaatgtgttgaaaaaggttgtccagggaaggtgcacgggcacgtgccgaagtatgacatccactgggttgtcaccattgtcatcccacataattgtgtgaggaagaacctgctggtgaagcatccgaacctgacttcaagtctcattgcgcaactcatgtatactgagatagtagagaagaaagatatggaagcaaaacacatccagacagcagtgaaggtcagatggaattatgtcattccttatgggaaggcttggagggctaagcagaaggctatggaggaaaggtttgggacgttcttcgactcatatgataatgttgtccgtctcctgggcatactgaaggagaggaatcccggcacttatgtgaacgtacaacacatgaggttgctgagtataccagatttcaaggtgttgaaacgagtgttcttctcttttggtatgtgcatcgaagctttccggcattgtcctcctgttatgtttgtggatggtacattcctgaccggtcagtatagagggcaaatcctgactgctattggtgtggacgggaacaatcaaatcatcccacttgccatggcatttgtggagggtgagaactttctcagctgggtatggttcttccgccaagtgaaaattgccattgtgaaggaccgaccaaacgtgtgtgtcattcatgacagacatgctggtatattgaaggccgtgaagacacttcgtaatccaacagatgacgaacgaacaccttggagggacttgcagagccggtggtgcatgcgccatcttggggctaattttttctcacagttcaagaacaagcggttgatgaacttgttcaaaaaattatgcaagcagagccagcagcg

SEQ ID NO: 28 - DNA, 15139 bp, Artificial Sequence
  Scaffold 1892710
tatatattgaagaaaatgagaagaaagaaaaaataaaaaacaaaaaaagaaatctgaaagaaaaaaaaaatagttcaaggaaagttctagaaccgtcccagtgtagatcaaatctgctaataggctggctcatacgaatactccacacatgaagggggtacacgccaggtcggtcgcgggtgaccttcgcgccaaattgacttatttttcctttacaaccccaacggtaaaatgaacattctatatggaaggtcgaagtcattgaatgaatcatctctactacttaaaaagaacgtaaggttcccatttcgcctttcttcccaccaccccttggtccaaccttccatgtatatgataatcaagcaccttaatttacttatcttctaaaccaattccactttaatttacttaccaaactactaatcaaaatataaaataattcacgggcaaaatttgatgaccatttatttacacaatcgcattattatcgacagataaatcacaagctaacctaatagaatatttatatttcattgcaacacacgggcattattctagtatgaagaaaaaaaaccatctcaaactatgtttaactatatttgccaaattccccaacaatttgattaaccgggccattttattcgttgaataggattgaatgctcctacacctttgagttatcaaaaaataatggcctaaaaagtcaatcatatacccacgccacaccatagcaatacgaagaagtgtgttggttgatgaacctttaaggctgtaacagaagtaatggagtgtatgttatacaaaagaagctgctgcgcagcaggatcgattaatttggccacgtgcatgtgcagaactgactatatatgcacaccgatgtgaaaatgcaatgttgaagcacttgaacccacacctcacatcttgtacatttccctcacacatttctaagctttggatttaactagccttcttctccattgcctttttcttgtatcacatgatagctcacgtttaaatgaagcaccctcttgacaccaactaatcctcctagctgtgagtccaagtaataaatcacatgatagctctgggccttacgaatgacttattccttttgtgaaaggaagaaccattctaagccattaggaataggaggcatggaaaatggtagttaccttcgccatacaatcttctacacatattcttccgacttctacagtagttgtcgaaacaactattaatgtcttaggagtcctttgctaacatctttgactttgtacaaccatccttttcatcctcattgggccgattatttcacttgtttgtcctgttgcatgccacggtgccattactaactttgtgaaagcattgtctgtagttgacatttttttgagctttaattagttggtttgttcatttgcacttttttgtgacactgtcaacataactagtggttttggtgagaaggtgatctagctccggagtaggagagatacttgttgcctactaatgcaggtgctaaatgttgactcgatggggaaggttggaggagtcgataatataatgggattatgaggtggtggaggtcgatcaacgtcgtagtttttggtgtacaacatatatcacattgtttaatgctcaaattttcttccgcattccatgctaggttagtgaggcaaaagatagatacctaggaatttttttctttgcaaagaatgatgctttcatagtaaaatttctgttactagtaggaatttctgatgtgttctttagaccgcagagagcatgtacaagctaaaatcaacttcctatgtaatacatataactggctgcatccagcaggaaaatgagaagaaaaactgtatataagtaacccaagaaagctttgtcatcttcgcagcttcactgcattgtcaacatcttcatccagcaatttggcgagccgcgggatatatttgacttttgttgcgcaactagttgtcttttctgtggttttgatttcttgatttctttccatcctgattctgtctgttttgttagtctaatcttgtccttgtaataaacttggtaattggtgtagtgcatatgtgctgtgttgtcaagttaaaattgttataagcacctagtcaacaatacagtggcgtcgacggcagctagaccgggcaaggtagatgcggcagtacaactctgaagatggattggtgggaggtggctgcggcgacctcatacccggtaggcgtcctggttgaggagtgcgacggactggtaggtgccccatacccggcaggcgtcctggttgggacctcaggtattagatgtttaggtttagttgcgaggtctctttggtattaggtccagactatcagcatcccttcatcaactagacaggagtaacgacaaatgttgctagacggtgactttagtcttactgttgtacgactttgtaaggtcttgtgtgtataattaataaagtggctgcatacatcgtccagatgcagaggccgggggtcttcctcctcctctaaaaaaaacctagtcaacaatatttgtgtaggcttggagctgcaagttatgtaccggcccatgccatggtcagctatggctgaaaagtgtgttgtagagcacgtcctggatggcgtagctcatagtacttgcgctgagaattaacttctgagtaattgcatgtaagatgcaaccattctctcagaggtcagcggctattctcagcgcaaccatcctctcgatgttccaggacatgcactcatcagttgagctggtgttattctagttctccaaccaaacaacgaacataacttagattgtagaaatagcgaagaaactggtcagataagattatcatcagaggaaacaacaccttataatatgtaaattctaacaactagggaaatattcatgagtagcaaaaccatagtgctacgattaatgggactacaattttcatggaaaggggcaaataaaacttgtgaaattaaaatattttctcaacaaagtcatacacgcgtgcttctatagttgataatgaagttgagaatggaaccagagacccggaaagaattaatcacaaagtcctactgaatgttggaacccaagctgtcaaactgatctcataggggatattctggcttgtgtatgagaccttatgatccgagaaccacctcacgatgttcatggattgcaggtcgagccaaaagaaaccgttgcatgcattgattagcacaatgccgctactctcggcgaaccacactagtttgaatttgactggcttcgtcggcggaatgcagctcccgcctgccttgtcaaggaagcgcaaaattgtctctgtcatgtcggtcaccacatgtggtcgtttttgccacatggctgtatgtttcgattgtgcccaagctgatattttatcatcgtgagcgacaagcacgagcacatccccaccaaccgatgatgttgcgagaagtttttggtgctctccgtggtgtgggaacctttttgggagcttcgtcaccatcacctttgctgctttgacgcggagcctaaggacgtaggattcggtgtcagtctggcacagccagtgcacagtgccaccggtgaccagggccttgccaagccttcgttgaaaactgctttgtaagtcaggaagccatgtctcggtgaagagaccccacgcgccattctctgtcgagaaggtctggaactgcaagctgccgccatattgggacatatctagacatgccttgaccacttgaaaatgccggccaatggaggtggccgccttagcacagtcaccaaccagcaagacataacttttctcagaccacccatgaaacttcggttcagatggcagggtcaggctcctaccggtggccgggtcgcacacacggagctctttggccacgcccacatgggcgagcacgagaccatcgcacgacgcgaggggaaagcctctgcgtgttgatgtgcgcagcttggtggcatccggtgcgctggtgtccagcagaaacaggttgtccttgggattgggccagccgttgaacccgtagatcaggtggccgcgcaggagggggagcacgaagcggtcttcctgctggaggcggagggggccgtggaggccgatgtattccttgaagcggcagcgcacgtccacacaggtggcggcgcagcgcacgaaggtggccgggtcggtgcgcgccgcaatgtccaccagcacgtccaacggcagcgacgctgccttctgcctccgccctcttgcagcttgcgtccgcgacctggcgccgccacctgccatggtttgattcctcgatatgtccggggcgagatcgatacgatcgcgtcccaatcgacgtggtataattagcctagaagagatatagcccagatcataaacgcccatcataggatctgttttctactctaataattattaccagcccattatacaaaccgatagagcgccttctgcaccgcttaatgttcctggcgctcgcgcgcgtcgcctagcgggctggcccaataacctcgccaaaaagaaaacgtggttgaaacataatttcaggtagtgggattcgaaccatcgcacctacatatacagccgaaagaaacagtgcacttaccaaagcactaggaccgctttcatgtctataatccaaaaacaaacctacttaatacttcttcttgtacaacattgacataacttctgtaccataaaaatcatttcagaaaagggaaacgtaaaaaagaaaaaggaaatcatagatgtgtaataaaagttcaattttaaaaaatattcatggaactcgaaaaggttcatcaattttttttaaaaagacgaattagaaaaaaaaaagttaaccaattctggaaaaagttcattgaatttgaaaaaaatagttcatcaattctgaatatagttcatcaaatttcgaatattccttttcttttaaatgcgaactatgtttttcagaaactgaacaaatttcgaaaattgaatactttttttgtactgtgaacaatttttagaaagcaaatttagaatacacattgaacattttcttagtatagggtgaacattatacaaagaaacactgaccatttttttagaatacgctgaactttttttgagtacatgctgaacaaaatttctctacacgatgaacattttttatacacactgaacactttttcaatgtatggcgaacaaaattcaaatacacatagaactttttttaaatacgatgaactccttttgagtgcatactgaacaaaatttctagacatgatgatcatttttttatacacactgaacattttttcaatgtatggtgaacatttttcttcaatacggtgaacaaaaatttcataaaatttgaaaattagttcattgaatttgaaaaacagttcatgaagttttaaaagtaattcatcgaaattcaaaaaaagttcatggatttccaaaaagttaaccgtgttcgatttttttatcaaatttcaaaataaaagttcattgactttgataaatgttcatcaattctgaaaaaaaagttcatcgaattgagaaaaagttcacaaatttgaagagaaggttcatgtatttaaaaaaatgaaaaatatataaaaaaataacaaaaacagttctaagaaaaacgaaaaaataaaataaaaaactaaacgaaactcttccaagaaaaaatagaaaaacgaaaaagaaacaagaaagaagaaaagaaataaaaaactgatgagagacgcaaaaggtgcggtggctgtggtggttattgtagtgatcttatgaccaggaagtcacggttcgattcccactgcgatcgtattatttttgctacttaataaagagcagggaaaaaaatgaaatgggccggcccgcgtggagaagggggtgtgcgcccgtttgccataacacctaaaacgccgtttaggaaatgccccaaagacctcacgtccccggctgccattctttgatgtgtccttcctgcggaggtatactgaagaatgttaagagagaagctgaaggagaccgttagcttatactccctccgttcctaaataattgtttttctagagattacaacaagtgactacatacggttatactccctccgttcctaaataattgtctttctagagattacaacaagtgactacatacggagcaaaatgagtgaatctacactttaaaacatgtctacatacatccgtatgttgtagttcatttgagatggctagaaggacaaatatttagaaacggagggagtagaacagatctttatgcacaacatgactgcatacatccgtatgttgtagttcatttgagatggctagaaggacaaatatttagaaacggagggagtagaatagatctttatgcacaacatgactgcatgagtgctctttacttcgcctatagctgatcatatattagcaatttatttctgggaaaactgatcaccatctggtcgctaattcctatactatttactgaaattagaaaagttatatgatccatagtacatttacatacaaatctgggatagtgccatcatgctggaggcaaaataatttatcccccatctctgatccactgaaagctccactgcggactgcagaaacaaacaaaagtaacaattcaagaattcaagatcatgtatgcaagatcgcgtcacctcgctgaaatggcactaaggacatgtcaacatgccacttcggtgccacgcgctacgcttgtctgttctgtactgtttttccatcagttatgcaagttcaggtactaaactggtcgaattttctaacttcctataccaaactaaacaattgcctcaaagacaaatcatgtcgtaaatagggaaagtagtgtgtgtcctcttcctaccgtgaagcccccagcctttgtttccagacattcatgggaggaaccatgaaattatttgagaagaaccatggtatatgctcaaaatttagtgatatgaattttattttattttccaaaaacaattatgcatgtacgtatggatgtacaccacacatgtgcattttgtgacgaaataagtgatcatgtgagctacacatgtggattccacggtgacatgatgtgtgtgttattttcgggagacgaaggttggagaaaagcgcctgcgactattgcagtcacagcgggatcagtagccacaaattaaggcttgttactagcggaagctgggatcaacagcgagtttacgtgtatcattggcacaaccgctgatatgttccactcagttcatcaccaaagagcaaaaaaaaattgttctcactcagacaattgccatataaattttcaattagtcggtgtgtttcttgtaacatcttaagaatacaaataaaatatgtgtgctccaatggcgagagctcagcacgctagatgatacacatctaagtcgttggtcagctagatgatacacactaaatcaattaaagagagaaagtaacaaataaaataaaatgaagaagacaaagtgaacatgaatatgcatattgttcaattgcaaggcggtctgctttcactggagcaaaaacccttatctgtgagagcttacaaatggcgtgtgccagtaaggacacaccaccagtagaacatcccatgcagctaatatatgtgctccaatggcgagaactcaacacgctagatgatacacatcaaagtcgttggattgacctagattgatggccaagatttgttggatctatccatttgggtcattgtatattggtatagataaactactatagttaatttacacaatcacatactcctatagttatcaatgaagttgagactagatctagaaacagaaatgaatgaatcataatgtgctactgaacctaggaacccaatctgccaaattcatttcataagggggctcgcctcacagtctccatggaccgcaggtcgacccagaagaaaccacaacatgtagtgatcagcacaatgcaactcctatcggcgaaccacactatgtcgagctggactggcctggtcggtcctttacaagttccgcccgccctatagaggaattgcaagatagcctccattgtctcgatcactacatgtggtcgttgttgccacttggccattttcttcgacggcacccaacccaatatcttgtcgtgagacatgacgagcacagttggtttccctctcgccattgacgtcgcaaggagttggcagtgctcaccgtcacgggggaagctcttcgtgagcatagtcaccgacacatgtgtcactccggcatggagtttgatgatggatgccccagtgtcaaccacacacaaccagtgatcactgccaccgataaccaagggcttgccgagtcctcgtctcaggcggctaccatttatgttaggagcgcacatcttaatacattggccccacgtgcctcgctccgatgagaatgtttggagttgcaggtgctggtggtttttttacagttctaggtaggccaggaccacatggaaatgccggccaatggtggtcacaccctctccccgacgatcaagacataactcactccatgaggatctgaccagtacagatggtagggtgtggctgctgccagtagctagtcgcagacgccgagctcttattccggcatgcgagcgaggtcgatgccatcgcgcaacacgaggggaggggggctaaagacagccatgtgcctacgcagattggcggcgtccaacgcgatggtgtccaccacaaacagctcctgctcgtcattgtgcctttgttcatactcgtagacccggtggccgcataggagcgtgggcatgaagtggtggccgtgcccgaggcggaggccatcgcggaggccatgttgctgtactgatgcccatgcacatataggattatgacgatcattgtacaagcagccctcttgttcttgttgcattttcatgatgtagaaccttgttgtcctggcgtgagatatcatggcgtattgccgtaccaaacttcacctgatgccggagggcactgcagtgacacttgcttgattccaccagaagattgtcaatgtggccttgccctgaaaaatcacaaagccaattcataaaaagaacgagtaaaaacatgccaaagaaaaagaaaagctagagtgatcttttcatggttgaaaattgatgcagaaacaaaacggggaaaaggagttgttagccacaaggtgtgaggtgacccagctggttatcacggttaggagtacaacgtaggtgtgatgttgaatcgcatgtactcacaatttttggcgtatgaagaacgcaaaagaataaatgaaaatgggaaagaaaagactaacatcgcaccgtacttctaacccccgcacctccaagggagagacctagggtcacaggccgccaggacgggccggccagaagcgcgtagcaactgcttttgcattggcagaggcgcagagctgatgaatcaactttacgtcctcggcgatgaaaagatcaacgccaggctattaaagccacgtaggatgttgctagccgaacaatgtggtactccctccgagcgtttagaatactaaaatagtgatctaaacgctcttatattagtttatagagagagtactaaacatttcaagcgctgcgtttgtttgtttgcagactgggtctttgtcttcgtccgctggcccacgaccttagccaaccataaccaacatgtcccctaccgcgtgcggtgcgcctgtctccgagagcaactaataaacaagcgttccttcaggagtctcgcaacgatcatcgccacttggtgcgctcacaacaattcgccatgtgtcacgctctgggcgctccctcctgattttgtttctatttttatttttctgcacacgttttcggctttttaaacagtttttttccagttttttcgatgttttggttttacaaaggtcttccctagcttttcgacaaaaaagaatcgaattttttttctttcgccaaaaaacacgttctttttatttcgcgagagtcacggttttgctttcgcgagagtcacggccgtgcctctcggaagcggaaaaaaaaatgtgttttctgttttttttttcttcgtgagagtcgaggttttgcttccgcgagaggcacggttgtgctttcgcgagagtcacggccgtgcctctcggaaacgaaaaaagacgcgttttttgtttttttctttcacgagagtcacggttttgcttctgcgagaggcacggttgtgctttcgcaagagttacggccgtgcctcctcggaaacggaaaaaaaacgtgttttatgtttttttttctttcacgagagtgacggttctgcttccgcgagaggcatggttgtgatttcgtcagaggcacggccctgcctctgtcggaaagggaagaaacccatgctccctgttcggttgttttgtgaaaaaaagttcgtcaaaacctatcaacatgggatctagttttgaagatctcgacgcgaggaatccaacggcgaaagcggttcgagatttggacggacggtttaagagataaaacgttttgaatcaacggatctaaaaaaaaagggaaaaatcccaggttgcgacaagcgatgcacatacatcatcggaaccccgagctcttcggcttcttaactggaggttattgccgagcacccgtgttctcttccctcgtggacctgaagtctgatcgcatccctgctgtgcgcttcgccatgccagaggacctagttcattgggattggtggggccctgtcttcttcggatgccaccacggcctcgccctcctcctcgatttcaagagccgcgaggccgttgtatgggaccccctcaccggtgttccacaccgtgttgcttttccaccaaggttcaagaacgacaaacgcaacaaagtccggagtgccgcggtactatgctccgaaaccgacgaacgacacgtgcatgacggttgctgtcttagttcgttcaaactggttttggttttccatgatgctaaacccacaaatacatccacttttatctatgattccaagtctggtatacggggagatattatctcaacaacgaatacagatgtgatatctatgaaaaggcccagtatcctagttgggaatgcactttttggaggcaacatccttgattttgatatgggaaggcaaacgttcgaactgaaaatatttatgtgggcttagaacatttccagtacccgctaaaataattttcaccgtgttccgaaataattctagattagtgattttcatctgcaaaaagcctctgaagtggttccggcagctccagagcaattccagcttttatcccagaaaatttcagaaagtttccagaatgactctggcaccctccaagaattatcaggcatgtgacgaaaccattttgacttaatagtatatcccgaaacaacttttctttttcacagaaactcatccgatgacctctctctgcggaactcttccgctgtccgaaacttttcggtgttcaaaactttttccgtgattttctctcagactccgtgtctagtattcagcagatagatgacccttaagcgtgtgaccctataggttcggtgaagtatagacatgacccggaaccccttccgatcaatgatcaacatcggagccgtggacacccatattgacccctatacccacacgaatgaatattcgagtgaacctccagttgcagtgagctattcctgttgcttcacgatatgtcacaaacacccgaggtgagatttattgcatccctgtggacgaacaatttttccaccttcaagttacctcgttaccggctttgttctcttttctcgtttccgtgttccggcatctgagtgatcaaatcacaaggtgtctggccagacaattgtggataccgtaacaccgagagggcccaagtaagggagtcctggattagggggtatccggacagccggactgtatacatcatccggactattgaagcgtgaaggtacaagactcaagactacggcccgtgtccggatgggactctcctttgcgtggaagacaagcttggcgatccggatattgtgtttccttccttgtaaccgactccatgtaaaccctagccctctccggtgtctatataaaccggaggggttggtccttagaaggccgatcacaattacaatcatagcatcataggctagctcttagggtttagcctctatgatctcgtggtagatctactcttgtactactcatatcttcaatattaatcaagcaggaagtagggttttacctccattgagagggcccgaacctgggtaaacattgtgtcccttgcttcctgttaccatcagcctagacgcacagatcgggaccccctaccgagatccgccggttttgacaccgacattggtgctttcattgagagttcctctgtgtcgtcgccgcagggctcgatggcgccttcaatcgtcaacaacacggtccagggggagacttttatccccggatagatcttcgtgttcggcggcttcgcactgcgggccaattcgcttggccatctggagcagatcgatagctacgcccccggccaccaggtcaggttcggaaacttgaactacatagcagatattcgcggagacattatctttgacggatttgggcctgtgccatgagcaccgaacagtcacgatgagcacggcctagacctgctgtcggatgaagctcgggatatcacccctgcagaagcctcagatctaaatccggagcaggttgcgttgcctaaggacggagggctggactccttcccgcaggccgcacactcatcgacggtggagccgaacacatgtctcacctctgtggaagcctgtaaccccgggcccccggattcttatccggttgttggttccggtccgcacaccctcgagccagccgagccaggttgggctccggtaatggagtttaccgctgcggacatctttcagcactcgccctttggcgacatgctgaactcattaaagtctctctctttgtcaggaggctttgggccgaactatgtccagcttgagtgggaagcaggcgacgaaggaattcgctgcccacccaccacccacttcatttccacggtcgatgatttaaccgacgtgcttgactttgactccgaagacatcgacggtaaggatgacgattcaggagaattgcaggagccaccgctcacagagcggtggacggccacctcctcatacgatatatacatggtggacactcagaaagaaaccaatggcgacgaggcaacggaggataacccctcaaggaaaaaagcaaagcatgggcgtcatcggggccgctccaagccccgtcacagcaataccggccccggagatgaaagcaatccggatggtgccgaagaggaatacaaccctgaccagcccgccttcgagcaggccgaacaggaagatgagcaggtcagcccagacgaacaggagaccgacggatatccggaggaggacaactatatacccccctccgaagacgagattagcctcggcgacgacgaattcggcatgcctgaggatcccgtggagctggagcgctggcttattgccactgcgaggagcctaaagaaaaagcagcagcaactccaggctgatcaagacctgctcacagatagatggactgaagtcctggcagccgaggaatacagactcgagcgccaaacggctgacggccaccccgtggacgggataaaacgggatatcggcccgaataccagcccgcacccccacgccaatacaatacggcccggggcaacaggcaggacctgcaagatattctggaaaacaaagcaggacagccaagatcgatctacggatcgcggggtcgcgccccatcgcgcgacgacgaccgtcacgccggatacattatcaacaagtccggccgggccaaacacagcaacccagaccaattcgaactgcgtagccacatagcccggcacagaggcgccgcacaccccctctgcttcactgacaaagtaatggatcatgaattcccagaagggttcaaacccgtaaacatcgaatcatacgatggcacaacagaccctgtagtatggatcaaagatttccttctccacattcttatgggccgcggagacgatctacacgccatcaagtaccttccccttaagctcaaaggaccggcccgacactggctaaacagtctgccagcaaattccattggcagttgggaaaattggaagacgcattcctcgacaacttccagggcacgtatgtgcgaccaccggacgctgatgtgtgacactccaaattttttcctttggttttcttcaaaattttgttggattttaaggaggtcaccaaaacacttccaaaaatctctatgaaaagctttttccctctggcaaatattttacttttgcatctccttcaactctggtgtttggtttttaaatttctctctgatttctctcttctcaaggattcaagaaaaatctttgaagtttatttttcctttcaaaaagaaactctaggagtcttcctttctctcccatatttgagattatttatggtttggccatactccacatggtaaaatcttcccaaatatgtctccttccaccttgggcaatccaaacattctgtctctactagttcaaccctcttctgaatttttatttcatttaaatccctcccaaaatcttttctgtctattattttgagcctaggtaatttgcaaagcaagtaccttaatgcatttgaattttgacctcaaaccaactcccttggatagtccttggtacccacaacctagaactatcaagatccactcctctcctgttcaaaaatttcaaattatagtctctgcaagtttggaccagatttgccaaatttggtgaaattcatatctacactactccaaaaattccacaaatattcaggcagtctctagatgcaatgagaggcccttccaccaaaaaccagctcaaggaaaaatccctagatgcctagatcattctgtcgaacaccttgcatgcactgtttctgttcattttcagttaagttcagagtttcagtgtcgatcttcgtcagtaaattcagtcacatgttcacagtgctcttggcacgt

SEQ ID NO: 29 - DNA, 22585 bp, Artificial Sequence
  Scaffold 1926247
  misc_feature (1)..(6068): n is a, c, g, or t
  misc_feature (8438)..(8477): n is a, c, g, or t
  misc_feature (10522)..(10598): n is a, c, g, or t
  misc_feature (11269)..(11375): n is a, c, g, or t
  misc_feature (11543)..(11737): n is a, c, g, or t
  misc_feature (11742)..(11818): n is a, c, g, or t
  misc_feature (12312)..(12330): n is a, c, g, or t
  misc_feature (15431)..(15467): n is a, c, g, or t
  misc_feature (19622)..(19678): n is a, c, g, or t
  misc_feature (19883)..(20089): n is a, c, g, or t
  misc_feature (20448)..(22273): n is a, c, g, or t
  misc_feature (22275)..(22439): n is a, c, g, or t
nnnnnnnnnnnnnnnnnnnnnnnnnnnnnnnnnnnnnnnnnnnnnnnnnnnnnnnnnnnnnnnnnnnnnnnnnnnnnnnnnnnnnnnnnnnnnnnnnnnnnnnnnnnnnnnnnnnnnnnnnnnnnnnnnnnnnnnnnnnnnnnnnnnnnnnnnnnnnnnnnnnnnnnnnnnnnnnnnnnnnnnnnnnnnnnnnnnnnnnnnnnnnnnnnnnnnnnnnnnnnnnnnnnnnnnnnnnnnnnnnnnnnnnnnnnnnnnnnnnnnnnnnnnnnnnnnnnnnnnnnnnnnnnnnnnnnnnnnnnnnnnnnnnnnnnnnnnnnnnnnnnnnnnnnnnnnnnnnnnnnnnnnnnnnnnnnnnnnnnnnnnnnnnnnnnnnnnnnnnnnnnnnnnnnnnnnnnnnnnnnnnnnnnnnnnnnnnnnnnnnnnnnnnnnnnnnnnnnnnnnnnnnnnnnnnnnnnnnnnnnnnnnnnnnnnnnnnnnnnnnnnnnnnnnnnnnnnnnnnnnnnnnnnnnnnnnnnnnnnnnnnnnnnnnnnnnnnnnnnnnnnnnnnnnnnnnnnnnnnnnnnnnnnnnnnnnnnnnnnnnnnnnnnnnnnnnnnnnnnnnnnnnnnnnnnnnnnnnnnnnnnnnnnnnnnnnnnnnnnnnnnnnnnnnnnnnnnnnnnnnnnnnnnnnnnnnnnnnnnnnnnnnnnnnnnnnnnnnnnnnnnnnnnnnnnnnnnnnnnnnnnnnnnnnnnnnnnnnnnnnnnnnnnnnnnnnnnnnnnnnnnnnnnnnnnnnnnnnnnnnnnnnnnnnnnnnnnnnnnnnnnnnnnnnnnnnnnnnnnnnnnnnnnnnnnnnnnnnnnnnnnnnnnnnnnnnnnnnnnnnnnnnnnnnnnnnnnnnnnnnnnnnnnnnnnnnnnnnnnnnnnnnnnnnnnnnnnnnnnnnnnnnnnnnnnnnnnnnnnnnnnnnnnnnnnnnnnnnnnnnnnnnnnnnnnnnnnnnnnnnnnnnnnnnnnnnnnnnnnnnnnnnnnnnnnnnnnnnnnnnnnnnnnnnnnnnnnnnnnnnnnnnnnnnnnnnnnnnnnnnnnnnnnnnnnnnnnnnnnnnnnnnnnnnnnnnnnnnnnnnnnnnnnnnnnnnnnnnnnnnnnnnnnnnnnnnnnnnnnnnnnnnnnnnnnnnnnnnnnnnnnnnnnnnnnnnnnnnnnnnnnnnnnnnnnnnnnnnnnnnnnnnnnnnnnnnnnnnnnnnnnnnnnnnnnnnnnnnnnnnnnnnnnnnnnnnnnnnnnnnnnnnnnnnnnnnnnnnnnnnnnnnnnnnnnnnnnnnnnnnnnnnnnnnnnnnnnnnnnnnnnnnnnnnnnnnnnnnnnnnnnnnnnnnnnnnnnnnnnnnnnnnnnnnnnnnnnnnnnnnnnnnnnnnnnnnnnnnnnnnnnnnnnnnnnnnnnnnnnnnnnnnnnnnnnnnnnnnnnnnnnnnnnnnnnnnnnnnnnnnnnnnnnnnnnnnnnnnnnnnnnnnnnnnnnnnnnnnnnnnnnnnnnnnnnnnnnnnnnnnnnnnnnnnnnnnnnnnnnnnnnnnnnnnnnnnnnnnnnnnnnnnnnnnnnnnnnnnnnnnnnnnnnnnnnnnnnnnnnnnnnnnnnnnnnnnnnnnnnnnnnnnnnnnnnnnnnnnnnnnnnnnnnnnnnnnnnnnnnnnnnnnnnnnnnnnnnnnnnnnnnnnnnnnnnnnnnnnnnnnnnnnnnnnnnnnnnnnnnnnnnnnnnnnnnnnnnnnnnnnnnnnnnnnnnnnnnnnnnnnnnnnnnnnnnnnnnnnnnnnnnnnnnnnnnnnnnnnnnnnnnnnnnnnnnnnnnnnnnnnnnnnnnnnnnnnnnnnnnnnnnnnnnnnnnnnnnnnnnnnnnnnnnnnnnnnnnnnnnnnnnnnnnnnnnnnnnnnnnnnnnnnnnnnnnnnnnnnnnnnnnnnnnnnnnnnnnnnnnnnnnnnnnnnnnnnnnnnnnnnnnnnnnnnnnnnnnnnnnnnnnnnnnnnnnnnnnnnnnnnnnnnnnnnnnnnnnnnnnnnnnnnnnnnnnnnnnnnnnnnnnnnnnnnnnnnnnnnnnnnnnnnnnnnnnnnnnnnnnnnnnnnnnnnnnnnnnnnnnnnnnnnnnnnnnnnnnnnnnnnnnnnnnnnnnnnnnnnnnnnnnnnnnnnnnnnnnnnnnnnnnnnnnnnnnnnnnnnnnnnnnnnnnnnnnnnnnnnnnnnnnnnnnnnnnnnnnnnnnnnnnnnnnnnnnnnnnnnnnnnnnnnnnnnnnnnnnnnnnnnnnnnnnnnnnnnnnnnnnnnnnnnnnnnnnnnnnnnnnnnnnnnnnnnnnnnnnnnnnnnnnnnnnnnnnnnnnnnnnnnnnnnnnnnnnnnnnnnnnnnnnnnnnnnnnnnnnnnnnnnnnnnnnnnnnnnnnnnnnnnnnnnnnnnnnnnnnnnnnnnnnnnnnnnnnnnnnnnnnnnnnnnnnnnnnnnnnnnnnnnnnnnnnnnnnnnnnnnnnnnnnnnnnnnnnnnnnnnnnnnnnnnnnnnnnnnnnnnnnnnnnnnnnnnnnnnnnnnnnnnnnnnnnnnnnnnnnnnnnnnnnnnnnnnnnnnnnnnnnnnnnnnnnnnnnnnnnnnnnnnnnnnnnnnnnnnnnnnnnnnnnnnnnnnnnnnnnnnnnnnnnnnnnnnnnnnnnnnnnnnnnnnnnnnnnnnnnnnnnnnnnnnnnnnnnnnnnnnnnnnnnnnnnnnnnnnnnnnnnnnnnnnnnnnnnnnnnnnnnnnnnnnnnnnnnnnnnnnnnnnnnnnnnnnnnnnnnnnnnnnnnnnnnnnnnnnnnnnnnnnnnnnnnnnnnnnnnnnnnnnnnnnnnnnnnnnnnnnnnnnnnnnnnnnnnnnnnnnnnnnnnnnnnnnnnnnnnnnnnnnnnnnnnnnnnnnnnnnnnnnnnnnnnnnnnnnnnnnnnnnnnnnnnnnnnnnnnnnnnnnnnnnnnnnnnnnnnnnnnnnnnnnnnnnnnnnnnnnnnnnnnnnnnnnnnnnnnnnnnnnnnnnnnnnnnnnnnnnnnnnnnnnnnnnnnnnnnnnnnnnnnnnnnnnnnnnnnnnnnnnnnnnnnnnnnnnnnnnnnnnnnnnnnnnnnnnnnnnnnnnnnnnnnnnnnnnnnnnnnnnnnnnnnnnnnnnnnnnnnnnnnnnnnnnnnnnnnnnnnnnnnnnnnnnnnnnnnnnnnnnnnnnnnnnnnnnnnnnnnnnnnnnnnnnnnnnnnnnnnnnnnnnnnnnnnnnnnnnnnnnnnnnnnnnnnnnnnnnnnnnnnnnnnnnnnnnnnnnnnnnnnnnnnnnnnnnnnnnnnnnnnnnnnnnnnnnnnnnnnnnnnnnnnnnnnnnnnnnnnnnnnnnnnnnnnnnnnnnnnnnnnnnnnnnnnnnnnnnnnnnnnnnnnnnnnnnnnnnnnnnnnnnnnnnnnnnnnnnnnnnnnnnnnnnnnnnnnnnnnnnnnnnnnnnnnnnnnnnnnnnnnnnnnnnnnnnnnnnnnnnnnnnnnnnnnnnnnnnnnnnnnnnnnnnnnnnnnnnnnnnnnnnnnnnnnnnnnnnnnnnnnnnnnnnnnnnnnnnnnnnnnnnnnnnnnnnnnnnnnnnnnnnnnnnnnnnnnnnnnnnnnnnnnnnnnnnnnnnnnnnnnnnnnnnnnnnnnnnnnnnnnnnnnnnnnnnnnnnnnnnnnnnnnnnnnnnnnnnnnnnnnnnnnnnnnnnnnnnnnnnnnnnnnnnnnnnnnnnnnnnnnnnnnnnnnnnnnnnnnnnnnnnnnnnnnnnnnnnnnnnnnnnnnnnnnnnnnnnnnnnnnnnnnnnnnnnnnnnnnnnnnnnnnnnnnnnnnnnnnnnnnnnnnnnnnnnnnnnnnnnnnnnnnnnnnnnnnnnnnnnnnnnnnnnnnnnnnnnnnnnnnnnnnnnnnnnnnnnnnnnnnnnnnnnnnnnnnnnnnnnnnnnnnnnnnnnnnnnnnnnnnnnnnnnnnnnnnnnnnnnnnnnnnnnnnnnnnnnnnnnnnnnnnnnnnnnnnnnnnnnnnnnnnnnnnnnnnnnnnnnnnnnnnnnnnnnnnnnnnnnnnnnnnnnnnnnnnnnnnnnnnnnnnnnnnnnnnnnnnnnnnnnnnnnnnnnnnnnnnnnnnnnnnnnnnnnnnnnnnnnnnnnnnnnnnnnnnnnnnnnnnnnnnnnnnnnnnnnnnnnnnnnnnnnnnnnnnnnnnnnnnnnnnnnnnnnnnnnnnnnnnnnnnnnnnnnnnnnnnnnnnnnnnnnnnnnnnnnnnnnnnnnnnnnnnnnnnnnnnnnnnnnnnnnnnnnnnnnnnnnnnnnnnnnnnnnnnnnnnnnnnnnnnnnnnnnnnnnnnnnnnnnnnnnnnnnnnnnnnnnnnnnnnnnnnnnnnnnnnnnnnnnnnnnnnnnnnnnnnnnnnnnnnnnnnnnnnnnnnnnnnnnnnnnnnnnnnnnnnnnnnnnnnnnnnnnnnnnnnnnnnnnnnnnnnnnnnnnnnnnnnnnnnnnnnnnnnnnnnnnnnnnnnnnnnnnnnnnnnnnnnnnnnnnnnnnnnnnnnnnnnnnnnnnnnnnnnnnnnnnnnnnnnnnnnnnnnnnnnnnnnnnnnnnnnnnnnnnnnnnnnnnnnnnnnnnnnnnnnnnnnnnnnnnnnnnnnnnnnnnnnnnnnnnnnnnnnnnnnnnnnnnnnnnnnnnnnnnnnnnnnnnnnnnnnnnnnnnnnnnnnnnnnnnnnnnnnnnnnnnnnnnnnnnnnnnnnnnnnnnnnnnnnnnnnnnnnnnnnnnnnnnnnnnnnnnnnnnnnnnnnnnnnnnnnnnnnnnnnnnnnnnnnnnnnnnnnnnnnnnnnnnnnnnnnnnnnnnnnnnnnnnnnnnnnnnnnnnnnnnnnnnnnnnnnnnnnnnnnnnnnnnnnnnnnnnnnnnnnnnnnnnnnnnnnnnnnnnnnnnnnnnnnnnnnnnnnnnnnnnnnnnnnnnnnnnnnnnnnnnnnnnnnnnnnnnnnnnnnnnnnnnnnnnnnnnnnnnnnnnnnnnnnnnnnnnnnnnnnnnnnnnnnnnnnnnnnnnnnnnnnnnnnnnnnnnnnnnnnnnnnnnnnnnnnnnnnnnnnnnnnnnnnnnnnnnnnnnnnnnnnnnnnnnnnnnnnnnnnnnnnnnnnnnnnnnnnnnnnnnnnnnnnnnnnnnnnnnnnnnnnnnnnnnnnnnnnnnnnnnnnnnnnnnnnnnnnnnnnnnnnnnnnnnnnnnnnnnnnnnnnnnnnnnnnnnnnnnnnnnnnnnnnnnnnnnnnnnnnnnnnnnnnnnnnnnnnnnnnnnnnnnnnnnnnnnnnnnnnnnnnnnnnnnnnnnnnnnnnnnnnnnnnnnnnnnnnnnnnnnnnnnnnnnnnnnnnnnnnnnnnnnnnnnnnnnnnnnnnnnnnnnnnnnnnnnnnnnnnnnnnnnnnnnnnnnnnnnnnnnnnnnnnnnnnnnnnnnnnnnnnnnnnnnnnnnnnnnnnnnnnnnnnnnnnnnnnnnnnnnnnnnnnnnnnnnnnnnnnnnnnnnnnnnnnnnnnnnnnnnnnnnnnnnnnnnnnnnnnnnnnnnnnnnnnnnnnnnnnnnnnnnnnnnnnnnnnnnnnnnnnnnnnnnnnnnnnnnnnnnnnnnnnnnnnnnnnnnnnnnnnnnnnnnnnnnnnnnnnnnnnnnnnnnnnnnnnnnnnnnnnnnnnnnnnnnnnnnnnnnnnnnnnnnnnnnnnnnnnnnnnnnnnnnnnnnnnnnnnnnnnnnnnnnnnnnnnnnnnnnnnnnnnnnnnnnnnnnnnnnnnnnnnnnnnnnnnnnnnnnnnnnnnnnnnnnnnnnnnnnnnnnnnnnnnnnnnnnnnnnnnnnnnnnnnnnnnnnnnnnnnnnnnnnnnnnnnnnnnnnnnnnnnnnnnnnnnnnnnnnnnnnnnnnnnnnnnnnnnnnnnnnnnnnnnnnnnnnnnnnnnnnnnnnnnnnnnnnnnnnnnnnnnnnnnnnnnnnnnnnnnnnnnnnnnnnnnnnnnnnnnnnnnnnnnnnnnnnnnnnnnnnnnnnnnnnnnnnnnnnnnnnnnnnnnnnnnnnnnnnnnnnnnnnnnnnnnnnnnnnnnnnnnnnnnnnnnnnnnnnnnnnnnnctaggtcaaactattgtgccttctgtacacacaataggcatgcggcaggtccatgtgcggtggattaagtatattagtgtccgtgttgtttgggtccatgttgtaatcacaaagaataatacataaaagagagtgcccaattattagatatctgcccccaattaggaatgcagctagtaatattaaagatgaatggagtttagttatgcacttgtttcttgagcaatgaccaggcatcctccgccactaatttgtccacgtggtggtagggaagtacagctttcatccctcgagctactctttcatctctagtagtgacgaggactcggctacctcgaaccacaacattggccaagggtgttttgagcacatcatcccatgctccatggttccacacatcatctagcaccaggaatagcttcttgcctttcaaggtagcggcaaggattggctgaagcacggccaacgcctttccaccaccatgtactcccccggcttgtgtgatgattgtcttgagcaattcaaccttgtgaaagtccttattgatgctcaaccatatcatcttctcgaactcagcattcaaggcttcatcattaaagaccttctgggcaagagtggtcttgccgatttcgtcgacaccaacaatggcgacgaccatgatgttggtgttgccctccttttcactcagcatgatctcaaccaaatttctcatgtcttgttcgatcttctccccgactaccccagatcgataaaactcccctgacgtctcacgtctcttattgtcagaatgagagccatggaccttgatgttgcaatcgtcataggaaccaagaggtatgaagttgaaagcagcgcttcgctccttgatgacgtcgagcctcttgttgagcgccttgacgcgggtgccgatgtcgtcggcatgggagggattccgcatgaagaagagcaaggggttgcagcaccccacatcagcagtggacataccgcgctccatggccttgagctggcaaaggtcgaggatgtcaacagcttcgtacatggcacggttgagctgggccacccactcttgcacgctcttgtcggtgatgtttctcctgtcagcatcggcgaggaagttcttggggtccctaagcttaatgtccatcttgtcgatctcgcgactgaatcaaagcagcatgtgcacctctttgctccccatctccgtcagcatgtgaagcacgtaggacgctaaggcatccagaaccatcgttatgtttgctacttttttccgttacaaattttaaccacatatcataatcatgcccgccactcgttgcagctgaagattcatccgactcctcaacaatagacatggcagcatcatcctcacagtcatccggctcctcaacgctcgtcatggctgcaatgtcctccatctctatgactatgttatgcaagtagcagcaagcatggattgtttcaactagagtgtctggattgacaggggatgacatctctccctgcaggtacttccatgtgtctttgaacctttccagcgccttctgaccgcaggttgtggctgcattgtgtctcctattgaactctgccttggagtcagagaggtcttcttcctggtaaggtgtgagtagccaggggagaagagggtatcctgcatcaccaattatgtactccccgacttttgatccatctaatcccaccttcagcttgctgccattcagccaaccgccctcctcgcacttcttgaacaaataagattcatgcaaaatgctcgactggttcatgctgcttatcggtccccaccaaatgttcatgaacctcatctctggatcaatgacgagctggactaggatgctgtcattcttctcgcggtcccagtttggtccaaatgggatgtgagttgtacatataacaccgcagcagttatgcatattgtggatcttgtcaaacatcgacttgaatttatccatttcgctagtctggccagcacaaatggtgctctgctcgcttgtccacagccacaacaaagctctcagttacatgtagctgaacatttttcttgtcattttgaaaacagactcaaatctttgtgtgtcctcaacataagttaaggttcctgcatgggaaaaaacaaaagtggttacatgatcctactcattcagaattggacgtagcctagggcggtatgtgagtataaatgatatttagcacatgagggagtgcagccaaatcactaagtcatccttatatttctctaaaaaaggcttccttatattttctttagagaaaaaggtgtcctaccctggaagggtgtgttcaaagggaatgagaatgtagggaatgcattccaactccagcatatgaatgaaagcnnnnnnnnnnnnnnnnnnnnnnnnnnnnnnnnnnnnnnnntataagttaagatgaatgggcattgccaatttacctgtagacctgaaagcagagaggctgacatttgtctccaatttatagctgttagctgtgtacaagacataccatttccttgaattctctccttcgcatgcatatgccttgacatgctcaacatggttgaacttgtaccactcagggccagattgtccctcaactatggaagcgagcagtgctaggctgtagtatagctcaaaatgcatcgggtttatccctcccatgtattctgggagtgtcaccatgtctttttccacaagtatgagcctctggagtgcaggaacaccctccagcaactttagctttgggcactcttcgatggtaattaagcttctgcagtctgggaagattagtgattctctctaggtcaaggttttcatccagatccagctcggccaaagatggaaagttctctacagagatgagaccctggacatgtatatgattaacttattcaaagccctttcctgggaggcaagtccaggaggaagacacttcaatttgcagcgctgtggcacaagtttctgcaagataggaaaggcttgcacttgctcctcccactcccactcctcccattccaccattcctacaaaatacaactcatgcaatttcggaaatgcagccaccatctgggaaggacggggactgtggtgatggtaggattgtatgaattcaggtccaacacgcttgatggctggagcacgcttgatctgaatgaactctaaataagggagctgacacgggccatcaggaagctgtgtgcagcaagccaggtcaagaatgaacaaaatcctcaagctcttgaggggcataactgatgatgacatcatccaacatgggagccatcggccaacatatcctctgatttcaagattctaacctgggcggagggcagagctcatcaaacaccttcttgatttgttgttgctcttcctcagagacactatcttcatctataatcagcccagcatctcccaatctactactacaagctaaggatagcctggtaagatgcaccttctcgccaagctttgcctttgctgtggacagggaagcagatacattctccaatccatctattccaagttctttgagccgagaaaaaggacccgattcttccaaactgcagcaatcaccatcctcacaggctggaaaaccacgtactatcctcaagtttgttaaaacactgaaccccctaggtatgccacttatatttgtttccctgaagtcgagataccttagctgctccaacattacaatgctatgtggaacttgcacaatttctttgcatcctctaaggctaatgtactgcaagaatttcatctttccaatgcaatctggtagacttagaatatccgttttttctaaggacaaatacctcaggtgcttgagtttatacaaagattcaagcaatgctacaacatgtgcagattttatatctaaagtacgtaggcatggaaacttaaccaaagaatcaccaggcttcatatttatgtggccaactaataatagtgttctcaatgtctgttgtgcttgtaaggaactccagtctaacccatctgattccgatgcttggttttctagagataaccgaagaaacttttgtgctttaagcttgctaacaaaactagtttctccactgtgggctgctagtgcctcatctctagccacaaattgaccaaacgagcgaacaacatcatgtatgttgcacagagattgatccgtgtactgtgtatttggctctatcaggttccttaatatcaactccttatagtactcccttcctaattcctccaagtcttctgagccgtgaagaaatccttcactgatccacatgccaatgatgttgttccaaaataacaatgcagttttagggagaagggagtagtacaaaaaacattgtttgatacaaggcaataaatcttcatagcttaaatatactgcatggtttaactcttcgggcatttcagatactgaccatatggagtcatgcagaaccatctcccacnnnnnnnnnnnnnnnnnnnnnnnnnnnnnnnnnnnnnnnnnnnnnnnnnnnnnnnnnnnnnnnnnnnnnnnnnnnnnggaattttttgggcttatttcatacatgtccaaaaatagataatgtttgatggagtgttttcaggtaggccagaatggtcaatcgtgacatggacacttgcttgcaaaatttggggtcatttcaagtatgtttaaaactagaccatgttcagcgaagggtgtccggacgggcgagaaggcttcatctgagagcacgtcttttctcgatatctttgaaattgccccaattttttgcatggccttgtatgaccaattcatggcaccatgcctagttgttttcgtttcgacaaattttgcattttctggagttctcacggtaaaaaaaaggtcgataaatggccgatgtgtcacaacttgtatacggtgtcaaaagtcgcactaggccagatatgtgcatccgtgagcacgtagtttttcctagtttgaatgcctctgattatttgcaatttcgatcattatcaatcaacatgaacattttcttatatcctaacaatttcttgaaatttgtaaacaattttggattttcaaattgtgtaagaaaattttataaacttgaacactttttccaaagttgtgaacaaattcccaacaattgatgttgtacaaaaatttcataccagataccacgtagttctttaaaatttatcaaccttttttttaattcaaacatnnnnnnnnnnnnnnnnnnnnnnnnnnnnnnnnnnnnnnnnnnnnnnnnnnnnnnnnnnnnnnnnnnnnnnnnnnnnnnnnnnnnnnnnnnnnnnnnnnnnnnnnnnngtattccaaaattgttttatgttttttaataatgttcaaaaaggcaagaaatgaactaatgtataaagaaaagaaatagaaaaaaacacgctttatgccttagcccaactaggaaaccacatcgctcccgtcgggtgcctattgggccggcccaagttttcgcggatnnnnnnnnnnnnnnnnnnnnnnnnnnnnnnnnnnnnnnnnnnnnnnnnnnnnnnnnnnnnnnnnnnnnnnnnnnnnnnnnnnnnnnnnnnnnnnnnnnnnnnnnnnnnnnnnnnnnnnnnnnnnnnnnnnnnnnnnnnnnnnnnnnnnnnnnnnnnnnnnnnnnnnnnnnnnnnnnnnnnnnnnnnnnnnnnnnnttttnnnnnnnnnnnnnnnnnnnnnnnnnnnnnnnnnnnnnnnnnnnnnnnnnnnnnnnnnnnnnnnnnnnnnnnnnnnnngcacaaattttaaaaattgttcatgtttcattaggctggcctagccgcacagcaacctcagtagatcatcagaattctgggaaagctccatccctgattttatatctcatgtcattgtaaacgacttgtccatcatttgaggaataaatcttactgctgtaaaaaacctcaagagacacatatggagtgaactatgctatccaggagtattcaactgaaccctgctgaactgaaccctgctgccgccgcggcatggcggcgcccacgcacaagcacaaccatccatcggactagaccagagtcgctccgatggcgccgtcgttgtcttgccgcaacccagccaggcccgcccccgattccccgataacccgctggtcgagggatccatcttggttactgaaatgcagattttacatgccaatcgatgtggaatcagtgggcccaataagaagcagcagctctattcatgtagtgtagtgtgcactgattcactnnnnnnnnnnnnnnnnnnnccctctgcagcatctgcagcgcatcacattcaggtgtattttgctctgaattttccacgactgccctttaattatgtatgcgatgcaaattctccagtttgcatcaaccgacggatgcgaactatagagtatagacagacagacagtctccaactctccatgcatctactacagacagacattggcaactcagagatgtcactgttgcaacaacaacgaagaggggaaacaaagcgaagagaaaaacgcaaaaccacacacgaactgaattagacacacaatttcagtcaagatcaagcacggcaaatatgtacgtaccaagaaatgcacaggttacggccgaattaacaaaaccgaagatcaaagagtgaagggaaccaactgaatgagaacagagcctgggacgtacactgactgggaattgcaaagagtctacaagcgtcgttttttcaacgcatacagtacatgccaacacctgtctttgccaaaattgttacagtataaaaaagaatgcccagcttcacttcctgtcgcagcatcagagtcgtctctggctccattgcatgggctccttcgcattcatggatttaagagctcccttccagcaggatgatggctttcccttcaacctggtcaaatcaaagttttaaacatatcatcatttttcatttccatcaagagtgtagctgttaacttcattatcaatccagagatgctattaaatgaacggaccatcaactgaagcaattgccagtacagggtgaaatgcataagagtctcagctaacaggtatataatgtgttgcatcagttcctttctttcagagttcatcagagattcttcttgttcacattagtgccgtatcaaaataacaaaccaacaagagaacaagacttgatgcagtagtacctagaatgaagctggaagatgtggcagaaacaagttgtttttcaattaacgatctcttcatctgctcttcttgtctgcacttcttgttccttgtcttcatccactgagccccatgcagctacttcatggtcctcctctgcatccaccgggccgactaaacagatggaggatgtaaacaacatgaggaaataattaattatgactaatcagtggacatagaaaccaaacaaataaatcaagatgtagtagaagttgtcttaattcacctcccaattcaagaagtattgcgacaacatatcccttgcccagacggcgtcctcattttctaactggcgcacttcctcacagtagttccaatcctcagatgtagacctcggcatggctgcatcatcctccatatctatgactatgttgtgcagcatgcagcaggcacggattatcttaactgcactatcgggattgacaggccaccacgtctcttcttgcaggtacttccatgtgcctttgaacctagccatcgccttcagcgcacaggttgtcgttgcagagtgtctccgattgaactccgccttggaatctgagaggtattcttcctggtaaggtgtgagtagccacgggagaagagggtatccttcatcgccaattatgtattccccgatttctgatccatctaatgctaccttcaacttgctgccgttcagccaatcgcccttttcggcccccttgaagatttcagagtcttgcaaaaggcttgcctggttcatgctacctgccagtccaaaggaagtgtccatgaacctcatccttgtatcaaccacaacttgcatctgagtgctctgtttcttctcacggtcacagtttgatccaaatgtgacgtgagttgtacatataacaccacaacagttaggcatattgtggatcttgccaaacatgaatttgatcccatccgttgcactggactctggccaatactcatggcgctctgctcgctcacacacagcagcaacgaacctctttgttaccaacatgatggttgactcgttcacaccaacagaggacgctatggtctctgttggctcattagaatacaaccttctgaaagcaacagctactcgatcttctaaagacagcaccctgccgtcaacaaaggtgtagctgtctatatcttccagtgatggcaccttcaccaaactgtagatgtagctaaaggcttttcttgtcattttgaagactgactcaaatctttgtgtgtcctcaacataagtcaaggttcctgcatgggaaaagacaaaagtggttacatgatccatgagttgcaaagcaatcactcaactgtgacgagctttaatttcttaagatactactcctcatttaaaatttggacatagcctagggggaaaactgagtataaatgatatctagcacatgacgaagtgcagccaaatcaataagccatccttatatttctgtgaaaaaagacatccttatatttaccatgaagggtgtattcaaagcgtatgagaatgtatggaatacattccagctccaacatatgaatgaaaggaagaaaacatagagaacaaatcaaataaaaacaacaaacagataaattatgttgaatgagcaatgccaatttacctctggacatgaaagcagagaggctaacatctgtctccaagttgtagggattagctgtgtacaagacataccatttccttgaattatctccgtcacgtgcatatgccttgacacgctcaacatggcggaacttgtcccactcagggccagattgtcccgcggctatggaagcgagcagtggtaggctacagtatagctccaaatgccttgcgtttataccccccatgtattctaggagtgtctccatgtctttatccgcgagagcgagcctatggagtgcaggaacaccctccaacaccttcagctttgtgcagtcttccatggaaagcttctgcagtcttggaagattagtgatcctctccaggtcaaggttttcatccagattcagctcaaccagagatggaaagttctctacagagatgagaccctgaacattgcatatggataatttattcaaagcccctgcctgagaggcaagaccaggaggaagacacttcaatttgcagtgtattagcacaagtttctgcagaacaggaaaggcttgcacttgctcnnnnnnnnnnnnnnnnnnnnnnnnnnnnnnnnnnnnnaaattcatcgcatgcaatttcggaaacccagacaccatctgggaggaactagccctgtggtgatggtagaactgcatgaattcaggtccaacacgcttgatggcaggagcacggttgatctgaatggactccaaataagggagctggcacaagccatcaggaagctgtctacaacaagtcaggtcagtgatgagcatgatcctcaagctattgaggggcataaccgatgatgacatcatccaccttgggagccatcggccaaaatatccttcgatgtgaagatattctaacctgggcggagggcagagctcatcaaacacctgctcgattcgttgttgctctagctcatcaaacacctgcttgctttgttgttgctcttccccagagacaccatcttcctctttaatcatcccataatctctaccacaatataaagataggttggtaagatactccttctcactaagctttgcctttgctgcggatgaggaagcaattacattctccattccgtccagtataagatcctggagccgagaaagaggacccaactcttccaaactgcaccaatcaccatccatccatgctggaaatccatgtaatatcctcaagtttgttagagcacaaaaccccctaggtatgccttttatacttgttccaactaagttaaggtaccttagctgccctaactttataatgctatgtggaagttccaccaattttttgcatccttgaaggctaatgtactgcaagaattttatcttttcaatgctatccggcagactagatatatcagtgtttttcaataacaagtacctcagggcttgagtttatgtaaatattcaagcaatggtacaacatgtgcagaaactatacataaagttcgtagacatggaaaatgaaccaaggaatcaccaagcttgatatttataaagccaactgatattagcacccttagtgtcttttgtgcttgcaaagaacaccagtctaaaccatttgattctgatcctttgctttctagagatattcgaagaaactcatgtgcactaagtttactaacaatattcgtttctccactgtgagctgccagtgcctcatctctagccagaaattgagcaaatgagcgtacaacatcatgcatgctgcaaacatcttgatcaatgtaccttgtatttggctctataagattccttagtatccgctccttatagtacttgcttccaagttcttctaagtcatccgaggtcccaagaagaaatccttcacttatccacatgccaatgattgcattgcaagaaaacactgtagttctagggagaagggagaaatgcagaaagcattgtttggcataagaagataaatcttcatagcttaaatatactgcatggtttagctcttcaggcattccagatatcgaccatatagaatcagccagaaccatctcccactcatggtgttttttgtccttctcacacagtagacctcccattactttgactgcaagaggcaaaccatcacatttggctacaatttgcaacccaatgtccttgagcatatcaatgtcatgtccctcaatctcacttgagattatctgcaagcagttgaactgatggagtcaataaggagtggtatttccttgaaaaaatagccgtttgttaactgctagtgccgaatcaatattagtcaataacaggctagtgagaaaagagactaacgaaagattggttagtgtagtgcctgaattgaactatcaggtgaataaactggtaagcggggatgttgctgttttttttttaactgggatgactagcatgtgagtgggtctggggctctgggcacgctttagtatcattgatcgataacaactttttcatactacaacatagtactactgtacaacttaatgtggatttattgacacctccagccaaacacgactgagttttagcccaaggaagaacaatatcaacatttttcacccgtttatgagttttagcctaaggattggctctgtatttgtgaacatgatggaaatggaggaacattgttttcagctttgttaaattgaagaacatttgtataatcctaagtatccatcttgtttggaatagcatttgaggtggtgactacatatatttcaaaaaattagctttctaaaagggggaaataatgccaagaagggaaaataattcttttagggaagcactagcaaaaattaattactctcagatagaactgtatttgtgttgttattggagtatggttgtccaactttcatgaacctaaatttcatacctaggtcaaactattgcaccttccatacacaatgtacacatgcggcttgcatgtgttgtggcataagtatatgtagtatctatgttgtatgagtccatgttataatctcaaagaataatacataaaagtatgtgcccaactattatacctctaccccaaattcagcatggagtttagttaggcacctgtttcttgagcaatgaccaggcatcatcatcctttaatttgtccacatggtgatagggaagcatagctttcatccctcgagctactatttcatctctagtagtgacgaggacacggctacctcgagccacaacattaacaaatggtgttttaagaacatcaccccatgctccatggttccacacatcatctagcaccaggaataacttcttccctttcaaggcagtagcaaggattggctgaagcacagtcaacgccttttcacctccgtgtaccacccctaccagtgtgatgatagtccttagcaggtcaaccttgtcaaagtccttgttgatgctcaaccatattgttttgtcaaactcggccttcatggtttcgtcattgaagattttctgggcaagagtggtcttaccgatcccaccaacaccaacaacagcaaacaccatgatgttgttgttgctctctttgtcaatcagcatcatttcaaccagctttcttgtgtcttcttcgatcttctccccgactacaccctgctggtcgaactcccctgatgtctcccgcctggcatcactagaacgaggggcgtgcacattgatgccacgatcctcataggaaccaagattgatgaagctaaaagcagcgcttcgctccttgatggcgtcgagcctcttgttaagcgccttgatgcgggtgccgatatcgcgggcatgggagggattccgcatgcaaaagagcaaggggttgaagcacccgcagtctactttggatgaaccccgctccatggccttgagcttgcagaggtcgaggatgtcggcagcttcgtacatgacgcgcttgagctccgccacccactcttggacgctctggtcagtgatgtttctcctgtcagcgtcagcgaggaagttcttgaggtccctaagcttgacgtccatcttgtcgatgtcgtcttcgactccaagaagcatgtgcacctcctcgctcaccatctcggtcagcatgttttgcacgtaggatgcaaaagcatccagaaccatggccatttttgctgtgttttgctgtaccgaagaggattatcaacatatcagcaaaggtaactacagattaagcagaggatgagcaatctgaaactgctgcagtatgaagctttacttgtgggtctcacctgcagtcaagctcagtttttgtttgtccaataaatatccccaatctcacgccggcgccacccagaatcgattcgccaccgcgccgacgatctgcaccggtccggggccgtcaggcgtcagccacgccgcgcggctgaaccggaaccccggctcgaaggcaggccgtccttgtggacggcgcccgggtactcggggtagtcgatgtcctccggccggcaaactgacggcacctcgataaaaaacaccgaccttgccccgccgtcgcccgattccacctccagctcgccggcgtcggacaccagcgcgtggcactctgccgatgccgtcggcgccgcccacctgaaaaggaaaaaaaatctccggccggaacgctgctgcagctgtgcgcttccgcccctcctttctccaaaatctgagcttgggtcctcgcgatttgcagcgaggcaactcgattcaggttgggtgttgctgtgattggatcggatttgtgtgttgtgtggcgtagggcgcnnnnnnnnnnnnnnnnnnnnnnnnnnnnnnnnnnnnnnnnnnnnnnnnnnnnnnnnngcggggttcaaaagcatggtggcgcagaggcatcaatcctttgagcaatggcacacgccgtcgcggttccttgctctcaacacaaggcaaggcaagagatgctttgcactccactcaactgatttctttcttttcttttttgttcaacgaccaaattaaatccccaccaaagtggccgagcaggcatctcatactactagtgcgnnnnnnnnnnnnnnnnnnnnnnnnnnnnnnnnnnnnnnnnnnnnnnnnnnnnnnnnnnnnnnnnnnnnnnnnnnnnnnnnnnnnnnnnnnnnnnnnnnnnnnnnnnnnnnnnnnnnnnnnnnnnnnnnnnnnnnnnnnnnnnnnnnnnnnnnnnnnnnnnnnnnnnnnnnnnnnnnnnnnnnnnnnnnnnnnnnnnnnnnnnnnnnngatgttgttatgttgaacttttttttaaggaactatatgctgaattttaataggaattaatacaggatatgaacactccaagccaaacatgacagcctacatcaagtgggagagcaaatttcgcttagtttcttttcaacaactatgcacagttttagtgattaacagaaatgttcataagattttaatacatgatcgtgaggcgctttaatccaacacatggcagcctacattgaaagagcaaaaaagaaaaagaaaataggtctttcgctcttgcctcttgtgacctctctgttaaggtttccctttttctcaccggcgccgctgccggtccgcttcgtctcctatgatccttaaannnnnnnnnnnnnnnnnnnnnnnnnnnnnnnnnnnnnnnnnnnnnnnnnnnnnnnnnnnnnnnnnnnnnnnnnnnnnnnnnnnnnnnnnnnnnnnnnnnnnnnnnnnnnnnnnnnnnnnnnnnnnnnnnnnnnnnnnnnnnnnnnnnnnnnnnnnnnnnnnnnnnnnnnnnnnnnnnnnnnnnnnnnnnnnnnnnnnnnnnnnnnnnnnnnnnnnnnnnnnnnnnnnnnnnnnnnnnnnnnnnnnnnnnnnnnnnnnnnnnnnnnnnnnnnnnnnnnnnnnnnnnnnnnnnnnnnnnnnnnnnnnnnnnnnnnnnnnnnnnnnnnnnnnnnnnnnnnnnnnnnnnnnnnnnnnnnnnnnnnnnnnnnnnnnnnnnnnnnnnnnnnnnnnnnnnnnnnnnnnnnnnnnnnnnnnnnnnnnnnnnnnnnnnnnnnnnnnnnnnnnnnnnnnnnnnnnnnnnnnnnnnnnnnnnnnnnnnnnnnnnnnnnnnnnnnnnnnnnnnnnnnnnnnnnnnnnnnnnnnnnnnnnnnnnnnnnnnnnnnnnnnnnnnnnnnnnnnnnnnnnnnnnnnnnnnnnnnnnnnnnnnnnnnnnnnnnnnnnnnnnnnnnnnnnnnnnnnnnnnnnnnnnnnnnnnnnnnnnnnnnnnnnnnnnnnnnnnnnnnnnnnnnnnnnnnnnnnnnnnnnnnnnnnnnnnnnnnnnnnnnnnnnnnnnnnnnnnnnnnnnnnnnnnnnnnnnnnnnnnnnnnnnnnnnnnnnnnnnnnnnnnnnnnnnnnnnnnnnnnnnnnnnnnnnnnnnnnnnnnnnnnnnnnnnnnnnnnnnnnnnnnnnnnnnnnnnnnnnnnnnnnnnnnnnnnnnnnnnnnnnnnnnnnnnnnnnnnnnnnnnnnnnnnnnnnnnnnnnnnnnnnnnnnnnnnnnnnnnnnnnnnnnnnnnnnnnnnnnnnnnnnnnnnnnnnnnnnnnnnnnnnnnnnnnnnnnnnnnnnnnnnnnnnnnnnnnnnnnnnnnnnnnnnnnnnnnnnnnnnnnnnnnnnnnnnnnnnnnnnnnnnnnnnnnnnnnnnnnnnnnnnnnnnnnnnnnnnnnnnnnnnnnnnnnnnnnnnnnnnnnnnnnnnnnnnnnnnnnnnnnnnnnnnnnnnnnnnnnnnnnnnnnnnnnnnnnnnnnnnnnnnnnnnnnnnnnnnnnnnnnnnnnnnnnnnnnnnnnnnnnnnnnnnnnnnnnnnnnnnnnnnnnnnnnnnnnnnnnnnnnnnnnnnnnnnnnnnnnnnnnnnnnnnnnnnnnnnnnnnnnnnnnnnnnnnnnnnnnnnnnnnnnnnnnnnnnnnnnnnnnnnnnnnnnnnnnnnnnnnnnnnnnnnnnnnnnnnnnnnnnnnnnnnnnnnnnnnnnnnnnnnnnnnnnnnnnnnnnnnnnnnnnnnnnnnnnnnnnnnnnnnnnnnnnnnnnnnnnnnnnnnnnnnnnnnnnnnnnnnnnnnnnnnnnnnnnnnnnnnnnnnnnnnnnnnnnnnnnnnnnnnnnnnnnnnnnnnnnnnnnnnnnnnnnnnnnnnnnnnnnnnnnnnnnnnnnnnnnnnnnnnnnnnnnnnnnnnnnnnnnnnnnnnnnnnnnnnnnnnnnnnnnnnnnnnnnnnnnnnnnnnnnnnnnnnnnnnnnnnnnnnnnnnnnnnnnnnnnnnnnnnnnnnnnnnnnnnnnnnnnnnnnnnnnnnnnnnnnnnnnnnnnnnnnnnnnnnnnnnnnnnnnnnnnnnnnnnnnnnnnnnnnnnnnnnnnnnnnnnnnnnnnnnnnnnnnnnnnnnnnnnnnnnnnnnnnnnnnnnnnnnnnnnnnnnnnnnnnnnnnnnngnnnnnnnnnnnnnnnnnnnnnnnnnnnnnnnnnnnnnnnnnnnnnnnnnnnnnnnnnnnnnnnnnnnnnnnnnnnnnnnnnnnnnnnnnnnnnnnnnnnnnnnnnnnnnnnnnnnnnnnnnnnnnnnnnnnnnnnnnnnnnnnnnnnnnnnnnnnnnnnnnnnnngagaaataaacacattagttacagtttttcctccatgtctctcggttaatagcgtctccagtgtggacggagttttaacaacaacagccatacattatgctgcaatgaacatccgacgagccaacacctcaagacaatctaaactt

SEQ ID NO: 30 - DNA, 20160 bp, Artificial Sequence
  Scaffold 1929618
  misc_feature (2)..(546): n is a, c, g, or t
  misc_feature (618)..(1259): n is a, c, g, or t
  misc_feature (2051)..(2380): n is a, c, g, or t
  misc_feature (4140)..(4249): n is a, c, g, or t
  misc_feature (5605)..(5722): n is a, c, g, or t
  misc_feature (6203)..(6277): n is a, c, g, or t
  misc_feature (6339)..(6373): n is a, c, g, or t
  misc_feature (8992)..(9100): n is a, c, g, or t
  misc_feature (9405)..(9627): n is a, c, g, or t
  misc_feature (11265)..(11299): n is a, c, g, or t
  misc_feature (17897)..(20160): n is a, c, g, or t
gnnnnnnnnnnnnnnnnnnnnnnnnnnnnnnnnnnnnnnnnnnnnnnnnnnnnnnnnnnnnnnnnnnnnnnnnnnnnnnnnnnnnnnnnnnnnnnnnnnnnnnnnnnnnnnnnnnnnnnnnnnnnnnnnnnnnnnnnnnnnnnnnnnnnnnnnnnnnnnnnnnnnnnnnnnnnnnnnnnnnnnnnnnnnnnnnnnnnnnnnnnnnnnnnnnnnnnnnnnnnnnnnnnnnnnnnnnnnnnnnnnnnnnnnnnnnnnnnnnnnnnnnnnnnnnnnnnnnnnnnnnnnnnnnnnnnnnnnnnnnnnnnnnnnnnnnnnnnnnnnnnnnnnnnnnnnnnnnnnnnnnnnnnnnnnnnnnnnnnnnnnnnnnnnnnnnnnnnnnnnnnnnnnnnnnnnnnnnnnnnnnnnnnnnnnnnnnnnnnnnnnnnnnnnnnnnnnnnnnnnnnnnnnnnnnnnnnnnnnnnnnnnnnnnnnnnnnnnnnnnnnnnnnnnnnnnnnnnnnnnnnnnnnnnnnnnnnnnnnnnnnnnnnnnnnnnnnnnnnnnnnnnnttcaaggagtcaactatatgtttcgtgctcacatgtcatgcttccaaaatttgcataggttgttcctcgttnnnnnnnnnnnnnnnnnnnnnnnnnnnnnnnnnnnnnnnnnnnnnnnnnnnnnnnnnnnnnnnnnnnnnnnnnnnnnnnnnnnnnnnnnnnnnnnnnnnnnnnnnnnnnnnnnnnnnnnnnnnnnnnnnnnnnnnnnnnnnnnnnnnnnnnnnnnnnnnnnnnnnnnnnnnnnnnnnnnnnnnnnnnnnnnnnnnnnnnnnnnnnnnnnnnnnnnnnnnnnnnnnnnnnnnnnnnnnnnnnnnnnnnnnnnnnnnnnnnnnnnnnnnnnnnnnnnnnnnnnnnnnnnnnnnnnnnnnnnnnnnnnnnnnnnnnnnnnnnnnnnnnnnnnnnnnnnnnnnnnnnnnnnnnnnnnnnnnnnnnnnnnnnnnnnnnnnnnnnnnnnnnnnnnnnnnnnnnnnnnnnnnnnnnnnnnnnnnnnnnnnnnnnnnnnnnnnnnnnnnnnnnnnnnnnnnnnnnnnnnnnnnnnnnnnnnnnnnnnnnnnnnnnnnnnnnnnnnnnnnnnnnnnnnnnnnnnnnnnnnnnnnnnnnnnnnnnnnnnnnnnnnnnnnnnnnnnnnnnnnnnnnnnnnnnnnnnnnnnnnnnnnnnnnnnnnnnnnnnnnnnnnnnnnnnnnnnnnnnnnnnnnnnnnnnnnnnnnnnnnnatcactgcccacttagaaacaacctcaattttgtaggcatatcaggactttctcgagcataggcatattgaggtgagggagtacttgcaacgagtgaaggcaaacgatgattacagccgtcaagtgatggcggttagttttgccctcttaaaccaagctcaaatttgcactttcattccttctgactttgttgatcacggcttgtttctaagtggacttgtttaactaacatccaggctatgttggcgtcttggactaactgcacggagccaccacaagttggacccccaccaccacttgcgggagacgccccacacattcccacgttcgaggaatggctggcactaggcggtgatactccggttagtaaatttgcctaactaatgacaaactatttctcgttcattcaacactatcatgtcatatttaccgttagaatcttctttcaaacatgtaggggaccggtggctcgactcctgctccgtcgaccccagtcactccgatctggcagagtgatggtggtcgcggtggcggttttggtggaggtggacttggcggcggcggttttggcggaggtggacttggtggtggtggtggttttggcggaggtgaacttggcggaggtggactcggtggtggtggtggttttggcggaggtggactcggtggtgcttgatgtcgatgatgattccgtgtatgcggccgttgtgccatgtctttcatgtttcaacttttatgatgtttcatgtcttgcactactcttatgttcgtggactttcgccagtgataacnnnnnnnnnnnnnnnnnnnnnnnnnnnnnnnnnnnnnnnnnnnnnnnnnnnnnnnnnnnnnnnnnnnnnnnnnnnnnnnnnnnnnnnnnnnnnnnnnnnnnnnnnnnnnnnnnnnnnnnnnnnnnnnnnnnnnnnnnnnnnnnnnnnnnnnnnnnnnnnnnnnnnnnnnnnnnnnnnnnnnnnnnnnnnnnnnnnnnnnnnnnnnnnnnnnnnnnnnnnnnnnnnnnnnnnnnnnnnnnnnnnnnnnnnnnnnnnnnnnnnnnnnnnnnnnnnnnnnnnnnnnnnnnnnnnnnnnnnnnnnnnnnnnnnnnnnnnnnnnnnnnnnnnnnnaacagatgggatcaaattcatgtttggtaagatccacaatatgcctaactgttgtggtgttatatgtacaactcacgtcccatttggatcaaactgtgaccgtgagaagaaacagagcactcagatgcaagttgtggttgatacaaggatgaggttcatggacacttcctttggactggcaggtagcatgaaccaggcaagccttttgcaagactctgaaatcttcaagggggccgaaaagggcgattggctgaatggcagcaagttgaaggtagcagtagatggatcagaaatcggggaatacataattggcgatgaaggatgccctcttctcccgtggctactcacaccttaccaggaagaagacctctcagagtccaagacggagttcaatcggagacactccgcagccacaacctgcgcgctgaatgcgatggcaaggttcaaaggcacatggaagtacctgcaagaagagacgtggtggccggtcaatcccgacactagagtgaagataatccgtgcctgctgcatgctgcacaacatagtcatagatatggaggatgatgcagccatgccgaggtctacatctgagggttggaactactgtgaggaagtgcgccagttagaaaatgaggacgccgtctgggcaagggatatgttgtcgcaatacttcttgaccaccatgtcatctgaatcgggaggtgaattaagacaacttctactacatcttgatttatttgtttggtttctatgtccactgatttgtcataattaattatttcctcatgttgtttacatcctccatctgtttagtcggcccggtggatgcagaggaggaccatgaagtagctgcatcgggctcaggggatgaaaacaaggaacaagaagtgcagacaagaagagcagacgaagagatcgttaattgaaaaacaacttgtttctgccacatcttccagcttcattctaggtactactgcatcaagtcttgttttcttgttggtttgttatttggatacggcactaatgtgaacaagaagaatctctgatgaactctgaaagaaaggaactgatacaacacattatatacctgttagctgagactcttatgcatttcaccctgtactggcaattgcttcagttgatggtccgttcatttaataacatctctggattgcaaatgaagttaacagctacactcttgatggaaatgaaaaatgacgatatgtttaaaaccttgatttgaccaggttgaagggaaagccatcatcctgctggaagggagctcttaaatccatgaatgcgaaggagcccatgcaatggagccagagacgactctgatgctgcgacaggaagtgaagttgggcattcttttttgtagtgtataatgtcagcaaagacaggtgttggcatgtactactgtatgtgttgaaaaagcgatgcttgtcgcgtagaagatgcttggttgattcggaacctgtgcatttttgggtacatccatatttgccatgcttcatcatggctggaagtgtctgtcgaattcagtttgtgtgtggttctgcgttttcctttcccctcttcgttgttgcaacactgacctccgtcagttggtgaaaacttgagaatttgcatacataagtaaagggaaggctatatttcgtggaaaattcagagcaaaatacacctgaatgtgatacactgcagatgctgcaaagggcaatgtcacctgtaggttgtagcttcttcctctccttcagtgctannnnnnnnnnnnnnnnnnnnnnnnnnnnnnnnnnnnnnnnnnnnnnnnnnnnnnnnnnnnnnnnnnnnnnnnnnnnnnnnnnnnnnnnnnnnnnnnnnnnnnnnnnnnnntacatgaatagaactgctgcttcttattgggccgaatgattccgcatcgattgcatgtaaaatctgtatttcagtggcccgcacggatctctcgaccagcgggttgtccgagcatcggcggcaggcctggttggttgcggcaagacaacgccggtggcgtcggaccgactccgcagcaacagcagggttcgtgagcaccgacaccgctgtgcctatccgtgtccgtgacatggtgggcttcagtggcgtggtccgacgaacagggcaggggcagcgctgccgtcttctccatcgtcgaccggcaggccatatctgcaccttcagccgccgtcacctgtccatggcatggcagcaccgcctggtaacacaaacaccacatcagcacatccattccattcattcagcccttgatccttagttttgctaattccaagtctgtgtgtgttttttagatacatctgcttttgttgtgattgtccttgactgttgtgttgactcaaggtgtccatctagttcagttcatgtgtgggattagcaattttcttttgcctttcttccccatcttcggttcacaggctgctaataaatttgttccggcaaaataataatgtactgccagaaaacgtctgatattatgggacagagagagtatgcatttataagtagcaaccaacatgctcaccacagctccgacattggggagcaataccggaggctgcggaggcgggcgtggaaggtcttgcaacgccgatgccaccgtcgtctgtccaactccatggcaccacatctctagtaactcaccctttgacctttaattttgctaattcctctgttgtgcttaaccattactgaaactgtccgtctaatttgtgttcacatcgttaattccaaattcaatgagagcactctgcattgtattacccagattcactcttagcagaatgcaattaacactgacatctctgaattagttaagcaacaacaaccgttattaggtccagttccgaagtatgtatgtcaaccgcagtcatggatgcacaacccgttttgattcagggatcttcagtatttgatttctgcactcctgataatagtgcctcgttctactacaattcaccggcttgctgtttctctatagctggtgtagtgttgctctgtttctgtggtcatttatctctaacatcctgtgttttttagttgtcatttcttatgtctagcattctctaactcaatatctcctgtgcaatttatctgcaaccttctcctgctcctccaagtgggactttgggaggtagaagatggtgacaattagtgctagttaaccggacaatgggtgcccaccagaaaggacttcannnnnnnnnnnnnnnnnnnnnnnnnnnnnnnnnnnnnnnnnnnnnnnnnnnnnnnnnnnnnnnnnnnnnnnnnnnnnnnnnnnnnnnnnnnnnnnnnnnnnnnnnnnnnnnnnnnnnntaaggcaagtattgtgcagcaagttaggctagtgtgaaatcaaaccaaagcacaaagagtcttttggctttggccttccgaacaaaacagaccgtttcaaagaaaagtacatcacttccttccgggaaataacaggatgcttccgagtcctggtttacgtgtttgagacaagctttttaggtcccgggggtcgggacacccggttatcatgtacgttcatgcagatacagtacctagagatttgtgccatgttctatcaagtgttttgtttagcaggcctagtgaatagtaatatggcaggcgtggggtacagctgatgctaggattcatgctctctctctcacaccagtccgcacagaacatttcgagggaacacccgtgacacagactttggagaggaacatttcgaattttaaataaaaaagagaaccttgcttttccagagaagtgattgagagaatgctttttataatgcaaggtnnnnnnnnnnnnnnnnnnnnnnnnnnnnnnnnnnnnnnnnnnnnnnnnnnnnnnnnnnnnnnnnnnnnnnnnnnnctgtgtattcatgtcaaacaatggagagactgtcagtagagtcagagagctgcctatcagtnnnnnnnnnnnnnnnnnnnnnnnnnnnnnnnnnnngacagtaccgctgcacagtttttaccagagtcaaaacatcccatgtggctacagtagcccgtcttgtcaaactggacgagagcagctgattagcacacttatcgctggaaagtatctgctacaagtcagacaatgtgagaatcttaaaggaactggatgactgggataatggggtgccgggactcccgggttctatcgcacctttccgtacgtgttttccttccctgcaaagccttcaataagagacggatatatctaggtacaacaagttgtattagagcttcttaataacattagaggtagcatcaattgtatcgtacccctcaccagctagctagctgccaactaacatatcactttgatgaataatccaagagtcaactcgtcatttaatttgtggacagatagcctggatccgttgatcacaatgttcgggttagtatattcgcatacaaattgcttgtaatctccctttagcttatatatacatagtgccccttccttattatccttcaaccggtactactgttctaccagttgctctagaggaactagagcaggacccaacatccatccatcttgaaggtaattttggatccactctgtatgtttagttggctttgctttcctctgttgatctttggtagcttgcccatgctcacaaattataacttgttcctcatgtacccatgttagcattcaagtgctgcctttttcactacttttgtctggcaatcttcagctgcaaggagtggtggggatgattatgatatgttgctaaaatttgtaacagaaaaaacatagcaaacacaacgatggtcttggatgcctttgcgtcctacgtgctgcacatgctgacggatattgcaagcaaagaggtgcacatgctgcttggattcagacgcgagattgacaagatggacaataagcttagggacctcgagaacttcctcgccgatgctgacaggagaaacatcaccgacaagagcgtgcaagagtgggtggcccagctcaagcgtgccatgtacgaagctgccgacatcctcgacctttgccagctcaaggccatggagcgaggtatgtcccctgcagatgtggggtgctgcaaccccttgctcttctgcatgcggaatccctcccatgcccacgagattggcacccgcatcaaggcgctcaacaagaggctcgacattatcaaggagcgaagcgctactttcagcttcatccctcttggttcctatgaggatcgcagcagcaaggtccatggctctcattctggcaataagagacgttagacgtcaggggagtttgatcggtctggtgtagtcggagagaagatcgaacaagacacgagaaagctggttgagatcatgctgcgtgaaacggagggcaacacgaacatcatggtagtcgccattgttggggttggtggaatcggcaagaccactcttgcccagaaagtcttcaatgacgaagccttgaacaacgagtttgagaagacgatatggttgagcatcaacaaggacttcgatgaggttgagttgctgaggacaatcatcacgcaagccgggggagtacatggtggtgaaaatatgttggctgtgcttcagccaatccttgctactaccttgaaagggaagaagctattcctggtgctagatgatgtttggaatcatggggcatgggatcatgtgctcaaaacaccattggctaacgttgtggctcgaggtagccgagtcatcgtcactactagacatgaaacagtagctcgaaggatgaaagctgtgcttccctaccaccgtgtggacaaattagacgaggaggatggctggttattgctcaagaaacaggtgtgcaactacaatccatgtatctttagtattattagctgcatatttttaatttggggtagagatctaataattgggcacactcttttatgtagtattgttctttgagattaaaacatggactaaatacaacacggacactacatatacttatgccacagcacatgcacctgccgcatgtgtactgtgtgtacagaaggcacaatattttaaacctgtatcaaatttagattgatgaaagttggacaaccatgctcccacaagtccacaaaaaccctagacctcatgtatcgttttttgattatagttgtacttaggagtaattaattcatttttttgcaactgtgactcaaagaactttttgctatgttgccactgttttcccccttagaaagctacaattttggaatataggtaatcgccacctgaagtgtaagtccaaacaaaatcaataattaggatagtataaatgttctttgatttataaaaggtgaaaaactgtggtattattcttccattccatcatattcacaaatacagtcaatccttgggttgaaactcagtcgtgtttggcatacgtggtacagtactattccacaatatgaaaaagttgtatttggtagaatgccaacaagaataggtttagccaacccgtcccatgaataggtttagaaaacccgtcccatgatctgccaacacgaatgaaaataagagctggtacttgacattcttctacttatatggatgtccagaatataaaattgcatannnnnnnnnnnnnnnnnnnnnnnnnnnnnnnnnnnnnnnnnnnnnnnnnnnnnnnnnnnnnnnnnnnnnnnnnnnnnnnnnnnnnnnnnnnnnnnnnnnnnnnnnnnnntataatttaaacatgtaaggaaagccctccacccttgtgtagttgtagatcaaatatgactctgttttccggagaataaatctgtgtagtttctgagaggagagattgaactaagcatcttgtgctacaagagtgagaaacttaacatcttgtctggttgagcatgttatgattatagtcactcacatgctaggcacccagttggcagcaacatccctgcttagcagttcattcacttgatagtgtacattaaccgatctttcttgcctctcttttctccactagcctattattaactaatatcnnnnnnnnnnnnnnnnnnnnnnnnnnnnnnnnnnnnnnnnnnnnnnnnnnnnnnnnnnnnnnnnnnnnnnnnnnnnnnnnnnnnnnnnnnnnnnnnnnnnnnnnnnnnnnnnnnnnnnnnnnnnnnnnnnnnnnnnnnnnnnnnnnnnnnnnnnnnnnnnnnnnnnnnnnnnnnnnnnnnnnnnnnnnnnnnnnnnnnnnnnnnnnnnnnnnnnnnnnnnnnnctgagaaataaacgtgtattggcagtggaaagtacggtagccgttcccacaaaaaaaacactgacggccaactacaaggaagagtccgggcaccccagagaaaaagaagagtccaagcaaattactacatctgatgatgtcatctaggatgtcagcaaattaaccaaatctacttgcacgtatatatagtagagggtcaattttactcacacaaagcatgagacaacgtccgatttgtacatgcagaagcacgtacatgcaaatgatgggatttagcctacttccatctgccacgtgaggctccaaaacttaagcacaccatatcttaaaactcatgccaccaaaagaaaaattaaaaacaattaacgcgcaggtctgatgggattaaattttattggtgctgtcctcaaaaaagtatgctaaacagtgtcctgtaatatttttttccaggaaaaatgtgtcctacagtacgatgtgcttataagtaaagttgttggagaacattattacattattagagtgccagaatcgggaagatgtaacacattttaatgtagagcacacatgactttcttatacgtatcaacttgcatgagttcgttggtgtaagaggtactcacaagtacgacacagatgcattggcgcataaataaacgttcaccgtcggaagcaacataagagtggtgattggaaaaaaggcaagagtacatgcataaatatatataaaccaagtacaaaacatgcaagcatgatttatggaaataaattatcggtcaatgcaaatatgcttatatgtgtgattgagcctatatcagaaataaaaaacaacattttgattgtcatacaagaaaattggaggaaacacatcatgtttactccagatgtactgaaaatatagatacaggaaaaacaatgttgcactgtaaaaaaggctatgataacaatgtacgccaaaaatgtgtaagaaatttcattaatagattgtaaattaacaaaatgtattagatggataatggacatagcaaactacaatataggtagaagcatcttcattgatggcactgcactaataaaatatgcaaaatgcaatagcatcagtgattatatgatttgaggagaagatggagatgatttgagtatctgccaccaatgatcagttctcttcatgtgtaaagtagccaaaaataaaacataagaaaaatcacagtaacttaccatatctttggtatttaaatttccttccataatgaaatttataagagatacatggatgaatgacatttaatatagacaattatttacatagatgtcaaagagacaaggcatcaatgtatacacttactggaattttttttaaaaaatagatagacatcaaagtgaagaaatcagcattgcaaaaggatattggagatgatcatgaataccaaatgaatatacaaggacggttgaggaccacaatgtcgttgagttttgacacaccaaagtgtttctgaaaacattacatacttactgcaagggtttctaccaaagttcaaatcatgtattctaggttgtttatcggatacaacactatcttctttttctatcaaagctaacgtaccgaatcaaataatagtaaaaaaagcaaggctaaatatnnnnnnnnnnnnnnnnnnnnnnnnnnnnnnnnnnntaattgacactaccagttaataagcggctattttttctctcaaggaaatcactccttattgactctatcagttcaactgcttgcagatattatcaagtgagattgatgaccgtgacattgatgtgctcaaggatattggagtgcaaattgtagcaaaatgtgatggtttgcctcttgctgtcaaagtaatgggaggagtcttgtgtcagaaggacagaaaacgccgtgagtgggagatggttctgaataattctgtatggtcgatatctggactgcccgaagagctgaaccatgcagtatatttaagctatgaagatttaccttcttgtgccaaacaatgctttctacactactcccttctccctaaaaccacagtgttccgttgcaatgaaatcactggcatgtggcttagagaaggatttcttcacggaacttccgatgactttgaagaactaggaagcaagtactataaggagctgatactgaggaatcttatagatccaaatacaaattatgttgatcaagttgtttgcaacatgcatgatgttattcgctcatttgctcaatttgttgctagagatgaggcactagcagctcacagtggagaaactagtattgttggtaaacttagtgcacatgattttcttcggttatctctagaaagcaaagcattggaatcagataggttaaactggagttctctgcaagcacaaaagacattgagggtactaatgtcagttgggtatatagatatcaagcctggtgatccattggttcattttccatgtctacgaactttacatatagattctgcaaatgctgtagctttgcttgaatctttgcatgaactcaagcacctgaggtatttgtccttaaagaatactaatatatctagtcttcctgatagcattggaaagatgaaattcttgcagtacattagccttcaagaatgcaaacaatttgtgaaacttccgcatagctttgtaaagttagggcagctaaggtaccttaacttcattgcaacaagcatagaaggcatacctaaggggtttcatgctctaacaaacttgagggtattagttgggtttccagcccatgtggatggtgattggtgtagtttggaagagttgggttctctttctcagctcaatcatcttgaattggacagattggagaatataactgcttcctcatctacagcaaaggcaaagcttgccgacaaggtgcatcttactattctatacttaaattgtggtagtatattgggagatgatgggctgattaaagaggaagatggtgtctccgatgaagagcaacaacaaatcgagaaggtgttcgatgagctctcccctccgcccaggttagaagatcttgagatcaaaggatattttggccgatggctcccaaggtggatgatgtcatcatcggttatgccccctcaagagcttgaggattctattcattactgacctggcttgctgcacacaacttcctaatggcctttgtcagctcccttatttggagttcattcagatcaaccgtgctccagccatcaagtgtattggacctgaattcatgcattcctaccatcaacacagtcctcgtccttcacaagtggtggctgcatttccgagattgcatgagatgcagttaacaggaatggtggaatgggaggagtgggagtgggaggagcaagtgcaagcctttcctgtcttgcaggaacttttttttgaagaactgcaaatggaagtgtcttcctcctggccttgcctcccaggcaagggctttgaatacgctatacatatacaatgtccagggtctcatctctctagagaactttccatttttggttgagctgaatctggatgaaaaccttgacctggagaggatcactaatctgccgagactacaaaagcttagcatcgaagattgcccaaagctgaaggtattggagggtcttgttgcactccagaggctcgttctctcgtataacgacatggaaaaaatcccagaatacatgggaggtataaacccaaggcgtttggagctatactgcagcctagcactgctcgcttccatagccgcgggacaatctggccctgagtgggacaagtttagccatgttgagcatgtcaaggcatatgcacgcgaaggaggtaattcaagggaatggtatgtcttctacacagctaaaccatacagcttggagacaaatgtcagccactctttcatgtccagaggtaatttagcattacttgttcatcttaatttatctgttttctctttttatttagtttgttctcttatggttgtttcttccttccatccataagctagagtttcgaatatatttgctacattcacattccctttgaataccccctccgagagtagtacactaggatatcaaatgtacatagtagtaatgacaacattgaaatgactaccttcttctctaaagaaaataattgaatggcttttttattgctttgtgatggctatgtgtttaccgatgcttcttttgatttgactgcactccctcatgccctaaatcccttatgacctaaatacttttataccagtttcccccctaggttacgtccaaattttaaatgaagagtagtatctttacaaattatcaaagctcatgtataatctatagatctcactgttttaacacagtcacatttgggctcttgccttgtaaatcatggatttgtaatcacttttattctttcttctcatgcaggaaccttgacttcttttgaggacgcacaaggatttgagtctctcttcaaaatgacgagaaaaacctttagctacatctgcagcttggtgatggagccatcaatggaagatatgaacagctacacctttattgacgggagggtgctacctttagaagatcgggtagctgttgctcttagaaggttgcagtctagtgagccaacagagagcatagcatcctatgttggtgtgaacgagccaatcatcttgttggtaactgagaggttcgttgatattgtgtgggagcgggcagaccaccactcaagcttgccagactgcagtgaaaatgatgaaatcaaatccaagtttgacaagatccacaatatgcataactgttgcggtgttatatgtacaactcacatcccatttggaccaaactgggaccatgagaagaatggcagcacactgatgcaggttgttgttgatccagagatgagatttagaaatatttggctcggatcagcaggtatgaaccagtcgaggcttttgcgggactctcaaatcttcaaggagtgcgagaagggcggttggctgaatggtagcaagcagaaggtagcattagatgaaacagaagtcggggaatacataattggtgatgcaggctatcctcttcttccctggctactcacaccttatcaggaagaagacctatcagattccaaggcagagttcaataggagacactccgcggctacaacctgtgctctgaaggcactggcaaggctcaaagacacatggaagtgcctgcagggagggacgtggtggctagccaatctgaaaacgagtgaaataatatatgcttgctgcatgttgcataacatagtcatagaaatggaggatgatgcagccatgctgagcaccaagcggagaaattactccaacgaagtgcgccatatagcaaaggaggacgctgtcagggcaagggatatgctgtcacaatacttcttggctagcaggtcatctaaatctggaggtgaattaccataacttctcctacatcttaattttatcatttggttgctctgttcacttatttttcatatttatttcctcctcctggatgcaaaggagggtgatgaagcagcttcatcaggctcaggaggtgaaagcaagaaacaaggagcgcatacaagaacagaagatggagagatatcagtattaactaggtactactgctaccccacactgtgcttgatcctgttattgaaactgctagtgagaatcctagtccagttcccacaagttaaagtcctactacgccgccatccggaaataccagagttctcttcttggtttgttctcttgatatggcactaatgctagtgagaatctttaattgcttaacttccttggttactatctatactgtttacatgactctgaaataatggtaattgaaacagctattagcaatgtgttaacttttttttagaacgaaggctcaaggagagcccggctttgaattaacaaagccatcaaccggccagggattacacaagccatcgatacaaccacttaacaactgcgaacagccgctaacaagaacagaaatgaaaaaaaatagcagatacacgatgttgccgaagcagcttacaagcaccaaagactacaagccctatagagataagcaaactgggcactagctagaagtcgatggagtcctccatgtgaagtagatcaagatgagcaaaacggaggggttcttcatacggagacaaagtccagcaatggtcgcaccctcatctacaccgaaaggtgacaccttgttcgatccgctcctctccaaatccagaggggatccctgcccctcgccttggctagaaaggcgccggaccgctcgaagatggaaaagctcaccctagagcaaggattggacatgatttcgggtaccatgggagattctcaaccggacacagcgctgcacgaggataactagacgaattgccacaccgcagatcactgctacaaccaccaagaggaaaaaactgcacaaaggcactgacactgaactaacgaacatcaagcaagatgaagcaaccttactggaagcagatcaagcccgtatggataggcaccgtgcccaagctaccacatcaagttgctgctagcaaaagagaggagccctatcccctccctgcccaagaatggcgccaaatctggcgagcaagcaaaacaaggatccggtgagcaagccaaagcggaacatcactgctacatagacaaagcaccaagcttcatctccctcgctgatgatgcagccaaccccacaaccacctcacaacactctgcactctcctaccatgcccaagacgacaccttgaagaaggtggcgacgcaagtcacgccgttgccgtccagtcttgaaaagacaagggttttcacccgggtcatggagcgggagggagaggaaacgaaccacgacgaagcctccgaggagggaaacggcacctgcctgtgtcgcccacgccatggccggagaaccagccaataatttctcccggtcctgttccacagctccaggcatccccacctaccacggatccggcgtccagaggccgccggcgaccagatccggcgaggaggagcgctgtgaggggaagtggaagccgccttcagatccagacgcatacggggaggccgcgcccccgctgcgaccggcgccagcgctcgccgtcactcgccgcccgcgcgaccaaggagacgggggacaacacccgcgacgccgctcgccgcagaaacggcgccgccgcaccacccgaggccgttgcctcggcgccctaagccctccgcaaggagcgaagcgaccagatcctcgccgccggcgtccctgggcaaccgcgcgggcttcgccggaggccacatcgggcggcgacgaggtgggaagagggggggaacgggggccggtggccggtggctagggtttttgtcgcctcccgagtcgccccgagcggagcgacgcgggggcggaggggggactttgtatgtagttgcccggtccagcaatgtgttaactctgactctgtactggcaattgctttagccgatgttccatgtaatagcatgcgtgatcctatatctgacaagtgatataattaaaaccttggtttgatcaggtgaaaggggggacgtggttggagcttttaaatgcacgaatgcagagcaggaaagacaagcgttgtcatgcagtctacttggtggatgggcagtaagcttttgtgtgtcaggagaaacgaattaaaatggtaagagtccacgcaattctcatatataggagaaacaccttcatctcagcagaacctcaatagtagtagtaaaacagagttagctttttcttgcttttttatacctggcttgttggttggaggtgtgatggcaattcccatgtagtagtaatcaacttgttcagacataacccgctcccccgctcccccgctctagcgcgcccttcctccgccggcggccactccggccccggcgtccaccccctccccctacgccggcagctactccggccccggcgtccaccctttttccccggcggcctctcggcctcggtgctcttcccccctgtttcccgttctcgttcgcgcccgccatggcggatggttctgcgagcccggcttcggtctccttcaagctccagcctattgtctccggtctggggctgtccggctcgtcgggatctgagggcctctccactggtgccggaggtgcgccggctgaccagggggtggccgcgggctctgctttgcagtggcgcaagccggggccgtcgcgcaaggcgctgtggtgcaaaaggcgtgcgcttcgnnnnnnnnnnnnnnnnnnnnnnnnnnnnnnnnnnnnnnnnnnnnnnnnnnnnnnnnnnnnnnnnnnnnnnnnnnnnnnnnnnnnnnnnnnnnnnnnnnnnnnnnnnnnnnnnnnnnnnnnnnnnnnnnnnnnnnnnnnnnnnnnnnnnnnnnnnnnnnnnnnnnnnnnnnnnnnnnnnnnnnnnnnnnnnnnnnnnnnnnnnnnnnnnnnnnnnnnnnnnnnnnnnnnnnnnnnnnnnnnnnnnnnnnnnnnnnnnnnnnnnnnnnnnnnnnnnnnnnnnnnnnnnnnnnnnnnnnnnnnnnnnnnnnnnnnnnnnnnnnnnnnnnnnnnnnnnnnnnnnnnnnnnnnnnnnnnnnnnnnnnnnnnnnnnnnnnnnnnnnnnnnnnnnnnnnnnnnnnnnnnnnnnnnnnnnnnnnnnnnnnnnnnnnnnnnnnnnnnnnnnnnnnnnnnnnnnnnnnnnnnnnnnnnnnnnnnnnnnnnnnnnnnnnnnnnnnnnnnnnnnnnnnnnnnnnnnnnnnnnnnnnnnnnnnnnnnnnnnnnnnnnnnnnnnnnnnnnnnnnnnnnnnnnnnnnnnnnnnnnnnnnnnnnnnnnnnnnnnnnnnnnnnnnnnnnnnnnnnnnnnnnnnnnnnnnnnnnnnnnnnnnnnnnnnnnnnnnnnnnnnnnnnnnnnnnnnnnnnnnnnnnnnnnnnnnnnnnnnnnnnnnnnnnnnnnnnnnnnnnnnnnnnnnnnnnnnnnnnnnnnnnnnnnnnnnnnnnnnnnnnnnnnnnnnnnnnnnnnnnnnnnnnnnnnnnnnnnnnnnnnnnnnnnnnnnnnnnnnnnnnnnnnnnnnnnnnnnnnnnnnnnnnnnnnnnnnnnnnnnnnnnnnnnnnnnnnnnnnnnnnnnnnnnnnnnnnnnnnnnnnnnnnnnnnnnnnnnnnnnnnnnnnnnnnnnnnnnnnnnnnnnnnnnnnnnnnnnnnnnnnnnnnnnnnnnnnnnnnnnnnnnnnnnnnnnnnnnnnnnnnnnnnnnnnnnnnnnnnnnnnnnnnnnnnnnnnnnnnnnnnnnnnnnnnnnnnnnnnnnnnnnnnnnnnnnnnnnnnnnnnnnnnnnnnnnnnnnnnnnnnnnnnnnnnnnnnnnnnnnnnnnnnnnnnnnnnnnnnnnnnnnnnnnnnnnnnnnnnnnnnnnnnnnnnnnnnnnnnnnnnnnnnnnnnnnnnnnnnnnnnnnnnnnnnnnnnnnnnnnnnnnnnnnnnnnnnnnnnnnnnnnnnnnnnnnnnnnnnnnnnnnnnnnnnnnnnnnnnnnnnnnnnnnnnnnnnnnnnnnnnnnnnnnnnnnnnnnnnnnnnnnnnnnnnnnnnnnnnnnnnnnnnnnnnnnnnnnnnnnnnnnnnnnnnnnnnnnnnnnnnnnnnnnnnnnnnnnnnnnnnnnnnnnnnnnnnnnnnnnnnnnnnnnnnnnnnnnnnnnnnnnnnnnnnnnnnnnnnnnnnnnnnnnnnnnnnnnnnnnnnnnnnnnnnnnnnnnnnnnnnnnnnnnnnnnnnnnnnnnnnnnnnnnnnnnnnnnnnnnnnnnnnnnnnnnnnnnnnnnnnnnnnnnnnnnnnnnnnnnnnnnnnnnnnnnnnnnnnnnnnnnnnnnnnnnnnnnnnnnnnnnnnnnnnnnnnnnnnnnnnnnnnnnnnnnnnnnnnnnnnnnnnnnnnnnnnnnnnnnnnnnnnnnnnnnnnnnnnnnnnnnnnnnnnnnnnnnnnnnnnnnnnnnnnnnnnnnnnnnnnnnnnnnnnnnnnnnnnnnnnnnnnnnnnnnnnnnnnnnnnnnnnnnnnnnnnnnnnnnnnnnnnnnnnnnnnnnnnnnnnnnnnnnnnnnnnnnnnnnnnnnnnnnnnnnnnnnnnnnnnnnnnnnnnnnnnnnnnnnnnnnnnnnnnnnnnnnnnnnnnnnnnnnnnnnnnnnnnnnnnnnnnnnnnnnnnnnnnnnnnnnnnnnnnnnnnnnnnnnnnnnnnnnnnnnnnnnnnnnnnnnnnnnnnnnnnnnnnnnnnnnnnnnnnnnnnnnnnnnnnnnnnnnnnnnnnnnnnnnnnnnnnnnnnnnnnnnnnnnnnnnnnnnnnnnnnnnnnnnnnnnnnnnnnnnnnnnnnnnnnnnnnnnnnnnnnnnnnnnnnnnnnnnnnnnnnnnnnnnnnnnnnnnnnnnnnnnnnnnnnnnnnnnnnnnnnnnnnnnnnnnnnnnnnnnnnnnnnnnnnnnnnnnnnnnnnnnnnnnnnnnnnnnnnnnnnnnnnnnnnnnnnnnnnnnnnnnnnnnnnnn

SEQ ID NO: 31 - DNA, 65001 bp, Artificial Sequence
  Scaffold 1934717
  misc_feature (1)..(3632): n is a, c, g, or t
  misc_feature (3651)..(3836): n is a, c, g, or t
  misc_feature (4675)..(7564): n is a, c, g, or t
  misc_feature (7587)..(15845): n is a, c, g, or t
  misc_feature (15868)..(18639): n is a, c, g, or t
  misc_feature (18642)..(20603): n is a, c, g, or t
  misc_feature (20788)..(27832): n is a, c, g, or t
  misc_feature (27849)..(27886): n is a, c, g, or t
  misc_feature (29054)..(30803): n is a, c, g, or t
  misc_feature (30909)..(31364): n is a, c, g, or t
  misc_feature (32055)..(32102): n is a, c, g, or t
  misc_feature (32856)..(32901): n is a, c, g, or t
  misc_feature (33417)..(33464): n is a, c, g, or t
  misc_feature (33476)..(33498): n is a, c, g, or t
  misc_feature (33768)..(33986): n is a, c, g, or t
  misc_feature (34456)..(34497): n is a, c, g, or t
  misc_feature (35684)..(35716): n is a, c, g, or t
  misc_feature (37245)..(37381): n is a, c, g, or t
  misc_feature (37863)..(37929): n is a, c, g, or t
  misc_feature (38201)..(38344): n is a, c, g, or t
  misc_feature (40087)..(40122): n is a, c, g, or t
  misc_feature (40774)..(40942): n is a, c, g, or t
  misc_feature (40946)..(41105): n is a, c, g, or t
  misc_feature (46397)..(46432): n is a, c, g, or t
  misc_feature (46587)..(46612): n is a, c, g, or t
  misc_feature (53817)..(53887): n is a, c, g, or t
  misc_feature (54138)..(54388): n is a, c, g, or t
  misc_feature (56433)..(56904): n is a, c, g, or t
  misc_feature (57323)..(57353): n is a, c, g, or t
  misc_feature (57890)..(57920): n is a, c, g, or t
  misc_feature (57937)..(57993): n is a, c, g, or t
  misc_feature (58976)..(59141): n is a, c, g, or t
  misc_feature (61926)..(61990): n is a, c, g, or t
  misc_feature (63603)..(63625): n is a, c, g, or t
nnnnnnnnnnnnnnnnnnnnnnnnnnnnnnnnnnnnnnnnnnnnnnnnnnnnnnnnnnnnnnnnnnnnnnnnnnnnnnnnnnnnnnnnnnnnnnnnnnnnnnnnnnnnnnnnnnnnnnnnnnnnnnnnnnnnnnnnnnnnnnnnnnnnnnnnnnnnnnnnnnnnnnnnnnnnnnnnnnnnnnnnnnnnnnnnnnnnnnnnnnnnnnnnnnnnnnnnnnnnnnnnnnnnnnnnnnnnnnnnnnnnnnnnnnnnnnnnnnnnnnnnnnnnnnnnnnnnnnnnnnnnnnnnnnnnnnnnnnnnnnnnnnnnnnnnnnnnnnnnnnnnnnnnnnnnnnnnnnnnnnnnnnnnnnnnnnnnnnnnnnnnnnnnnnnnnnnnnnnnnnnnnnnnnnnnnnnnnnnnnnnnnnnnnnnnnnnnnnnnnnnnnnnnnnnnnnnnnnnnnnnnnnnnnnnnnnnnnnnnnnnnnnnnnnnnnnnnnnnnnnnnnnnnnnnnnnnnnnnnnnnnnnnnnnnnnnnnnnnnnnnnnnnnnnnnnnnnnnnnnnnnnnnnnnnnnnnnnnnnnnnnnnnnnnnnnnnnnnnnnnnnnnnnnnnnnnnnnnnnnnnnnnnnnnnnnnnnnnnnnnnnnnnnnnnnnnnnnnnnnnnnnnnnnnnnnnnnnnnnnnnnnnnnnnnnnnnnnnnnnnnnnnnnnnnnnnnnnnnnnnnnnnnnnnnnnnnnnnnnnnnnnnnnnnnnnnnnnnnnnnnnnnnnnnnnnnnnnnnnnnnnnnnnnnnnnnnnnnnnnnnnnnnnnnnnnnnnnnnnnnnnnnnnnnnnnnnnnnnnnnnnnnnnnnnnnnnnnnnnnnnnnnnnnnnnnnnnnnnnnnnnnnnnnnnnnnnnnnnnnnnnnnnnnnnnnnnnnnnnnnnnnnnnnnnnnnnnnnnnnnnnnnnnnnnnnnnnnnnnnnnnnnnnnnnnnnnnnnnnnnnnnnnnnnnnnnnnnnnnnnnnnnnnnnnnnnnnnnnnnnnnnnnnnnnnnnnnnnnnnnnnnnnnnnnnnnnnnnnnnnnnnnnnnnnnnnnnnnnnnnnnnnnnnnnnnnnnnnnnnnnnnnnnnnnnnnnnnnnnnnnnnnnnnnnnnnnnnnnnnnnnnnnnnnnnnnnnnnnnnnnnnnnnnnnnnnnnnnnnnnnnnnnnnnnnnnnnnnnnnnnnnnnnnnnnnnnnnnnnnnnnnnnnnnnnnnnnnnnnnnnnnnnnnnnnnnnnnnnnnnnnnnnnnnnnnnnnnnnnnnnnnnnnnnnnnnnnnnnnnnnnnnnnnnnnnnnnnnnnnnnnnnnnnnnnnnnnnnnnnnnnnnnnnnnnnnnnnnnnnnnnnnnnnnnnnnnnnnnnnnnnnnnnnnnnnnnnnnnnnnnnnnnnnnnnnnnnnnnnnnnnnnnnnnnnnnnnnnnnnnnnnnnnnnnnnnnnnnnnnnnnnnnnnnnnnnnnnnnnnnnnnnnnnnnnnnnnnnnnnnnnnnnnnnnnnnnnnnnnnnnnnnnnnnnnnnnnnnnnnnnnnnnnnnnnnnnnnnnnnnnnnnnnnnnnnnnnnnnnnnnnnnnnnnnnnnnnnnnnnnnnnnnnnnnnnnnnnnnnnnnnnnnnnnnnnnnnnnnnnnnnnnnnnnnnnnnnnnnnnnnnnnnnnnnnnnnnnnnnnnnnnnnnnnnnnnnnnnnnnnnnnnnnnnnnnnnnnnnnnnnnnnnnnnnnnnnnnnnnnnnnnnnnnnnnnnnnnnnnnnnnnnnnnnnnnnnnnnnnnnnnnnnnnnnnnnnnnnnnnnnnnnnnnnnnnnnnnnnnnnnnnnnnnnnnnnnnnnnnnnnnnnnnnnnnnnnnnnnnnnnnnnnnnnnnnnnnnnnnnnnnnnnnnnnnnnnnnnnnnnnnnnnnnnnnnnnnnnnnnnnnnnnnnnnnnnnnnnnnnnnnnnnnnnnnnnnnnnnnnnnnnnnnnnnnnnnnnnnnnnnnnnnnnnnnnnnnnnnnnnnnnnnnnnnnnnnnnnnnnnnnnnnnnnnnnnnnnnnnnnnnnnnnnnnnnnnnnnnnnnnnnnnnnnnnnnnnnnnnnnnnnnnnnnnnnnnnnnnnnnnnnnnnnnnnnnnnnnnnnnnnnnnnnnnnnnnnnnnnnnnnnnnnnnnnnnnnnnnnnnnnnnnnnnnnnnnnnnnnnnnnnnnnnnnnnnnnnnnnnnnnnnnnnnnnnnnnnnnnnnnnnnnnnnnnnnnnnnnnnnnnnnnnnnnnnnnnnnnnnnnnnnnnnnnnnnnnnnnnnnnnnnnnnnnnnnnnnnnnnnnnnnnnnnnnnnnnnnnnnnnnnnnnnnnnnnnnnnnnnnnnnnnnnnnnnnnnnnnnnnnnnnnnnnnnnnnnnnnnnnnnnnnnnnnnnnnnnnnnnnnnnnnnnnnnnnnnnnnnnnnnnnnnnnnnnnnnnnnnnnnnnnnnnnnnnnnnnnnnnnnnnnnnnnnnnnnnnnnnnnnnnnnnnnnnnnnnnnnnnnnnnnnnnnnnnnnnnnnnnnnnnnnnnnnnnnnnnnnnnnnnnnnnnnnnnnnnnnnnnnnnnnnnnnnnnnnnnnnnnnnnnnnnnnnnnnnnnnnnnnnnnnnnnnnnnnnnnnnnnnnnnnnnnnnnnnnnnnnnnnnnnnnnnnnnnnnnnnnnnnnnnnnnnnnnnnnnnnnnnnnnnnnnnnnnnnnnnnnnnnnnnnnnnnnnnnnnnnnnnnnnnnnnnnnnnnnnnnnnnnnnnnnnnnnnnnnnnnnnnnnnnnnnnnnnnnnnnnnnnnnnnnnnnnnnnnnnnnnnnnnnnnnnnnnnnnnnnnnnnnnnnnnnnnnnnnnnnnnnnnnnnnnnnnnnnnnnnnnnnnnnnnnnnnnnnnnnnnnnnnnnnnnnnnnnnnnnnnnnnnnnnnnnnnnnnnnnnnnnnnnnnnnnnnnnnnnnnnnnnnnnnnnnnnnnnnnnnnnnnnnnnnnnnnnnnnnnnnnnnnnnnnnnnnnnnnnnnnnnnnnnnnnnnnnnnnnnnnnnnnnnnnnnnnnnnnnnnnnnnnnnnnnnnnnnnnnnnnnnnnnnnnnnnnnnnnnnnnnnnnnnnnnnnnnnnnnnnnnnnnnnnnnnnnnnnnnnnnnnnnnnnnnnnnnnnnnnnnnnnnnnnnnnnnnnnnnnnnnnnnnnnnnnnnnnnnnnnnnnnnnnnnnnnnnnnnnnnnnnnnnnnnnnnnnnnnnnnnnnnnnnnnnnnnnnnnnnnnnnnnnnnnnnnnnnnnnnnnnnnnnnnnnnnnnnnnnnnnnnnnnnnnnnnnnnnnnnnnnnnnnnnnnnnnnnnnnnnnnnnnnnnnnnnnnnnnnnnnnnnnnnnnnnnnnnnnnnnnnnnnnnnnnnnnnnnnnnnnnnnnnnnnnnnnnnnnnnnnnnnnnnnnnnnnnnnnnnnnnnnnnnnnnnnnnnnnnnnnnnnnnnnnnnnnnnnnnnnnnnnnnnnnnnnnnnnnnnnnnnnnnnnnnnnnnnnnnnnnnnnnnnnnnnnnnnnnnnnnnnnnnnnnnnnnnnnnnnnnnnnnnnnnnnnnnnnnnnnnnnnnnnnnnnnnnnnnnnnnnnnnnnnnnnnnnnnnnnnnnnnnnnnnnnnnnnnnnnnnnnnnnnnnnnnnnnnnnnnnnnnnnnnnnnnnnnagcacgctgtcagttgtgnnnnnnnnnnnnnnnnnnnnnnnnnnnnnnnnnnnnnnnnnnnnnnnnnnnnnnnnnnnnnnnnnnnnnnnnnnnnnnnnnnnnnnnnnnnnnnnnnnnnnnnnnnnnnnnnnnnnnnnnnnnnnnnnnnnnnnnnnnnnnnnnnnnnnnnnnnnnnnnnnnnnnnnnnnnnnnnnnnnnnnnnnntgagatatacgctcacccgagcaggtccttcagctcctccgaccgcacgccagttggcgccggaccgtccggccccgccggactcggggaaactctccgtgacgacactttagggtctcccgcctcacacgaaggcgcgataggtcgaggcgtttctctctctatcatctttggacgaagatcccccgaagacgagctctgctgagaagggctgagatctgaactacaaggtacaatttcggttatcttcagaaataaatacagggatgttctttattcacaggaccccttctttttacttacggctcgctggtgggctgatccccttggggaaatagtgcagctggggtacttcccggcgccggactttctgacgaagacttctttccccgttttgaggccttggcttccgggtcttcggaagcggtcctcttctacctttggaggagaggatccctgatcccctcttccttgaaagcctccttcacggaggcagttgcttccctgctccccccttcgccttctttaaaaggcgcggccttcaacatcttggtcagcatgggatcctgcgtggtctctgggaggggagccggacaccttatcaacttttccttggctatccactcctgttcaaaaaacggctcccttaaagggcgtatatatgataaatgaatgaacagcctgtccggttacagggttacttacttgagtatctgggtgattccagcttagaactgcgtcctcggtcaagtccggacacttctcttgtgatccgaagaacagtttgtacatctccttgggctcgcgcccataaaatgttggagagctcgtggtccctnnnnnnnnnnnnnnnnnnnnnnnnnnnnnnnnnnnnnnnnnnnnnnnnnnnnnnnnnnnnnnnnnnnnnnnnnnnnnnnnnnnnnnnnnnnnnnnnnnnnnnnnnnnnnnnnnnnnnnnnnnnnnnnnnnnnnnnnnnnnnnnnnnnnnnnnnnnnnnnnnnnnnnnnnnnnnnnnnnnnnnnnnnnnnnnnnnnnnnnnnnnnnnnnnnnnnnnnnnnnnnnnnnnnnnnnnnnnnnnnnnnnnnnnnnnnnnnnnnnnnnnnnnnnnnnnnnnnnnnnnnnnnnnnnnnnnnnnnnnnnnnnnnnnnnnnnnnnnnnnnnnnnnnnnnnnnnnnnnnnnnnnnnnnnnnnnnnnnnnnnnnnnnnnnnnnnnnnnnnnnnnnnnnnnnnnnnnnnnnnnnnnnnnnnnnnnnnnnnnnnnnnnnnnnnnnnnnnnnnnnnnnnnnnnnnnnnnnnnnnnnnnnnnnnnnnnnnnnnnnnnnnnnnnnnnnnnnnnnnnnnnnnnnnnnnnnnnnnnnnnnnnnnnnnnnnnnnnnnnnnnnnnnnnnnnnnnnnnnnnnnnnnnnnnnnnnnnnnnnnnnnnnnnnnnnnnnnnnnnnnnnnnnnnnnnnnnnnnnnnnnnnnnnnnnnnnnnnnnnnnnnnnnnnnnnnnnnnnnnnnnnnnnnnnnnnnnnnnnnnnnnnnnnnnnnnnnnnnnnnnnnnnnnnnnnnnnnnnnnnnnnnnnnnnnnnnnnnnnnnnnnnnnnnnnnnnnnnnnnnnnnnnnnnnnnnnnnnnnnnnnnnnnnnnnnnnnnnnnnnnnnnnnnnnnnnnnnnnnnnnnnnnnnnnnnnnnnnnnnnnnnnnnnnnnnnnnnnnnnnnnnnnnnnnnnnnnnnnnnnnnnnnnnnnnnnnnnnnnnnnnnnnnnnnnnnnnnnnnnnnnnnnnnnnnnnnnnnnnnnnnnnnnnnnnnnnnnnnnnnnnnnnnnnnnnnnnnnnnnnnnnnnnnnnnnnnnnnnnnnnnnnnnnnnnnnnnnnnnnnnnnnnnnnnnnnnnnnnnnnnnnnnnnnnnnnnnnnnnnnnnnnnnnnnnnnnnnnnnnnnnnnnnnnnnnnnnnnnnnnnnnnnnnnnnnnnnnnnnnnnnnnnnnnnnnnnnnnnnnnnnnnnnnnnnnnnnnnnnnnnnnnnnnnnnnnnnnnnnnnnnnnnnnnnnnnnnnnnnnnnnnnnnnnnnnnnnnnnnnnnnnnnnnnnnnnnnnnnnnnnnnnnnnnnnnnnnnnnnnnnnnnnnnnnnnnnnnnnnnnnnnnnnnnnnnnnnnnnnnnnnnnnnnnnnnnnnnnnnnnnnnnnnnnnnnnnnnnnnnnnnnnnnnnnnnnnnnnnnnnnnnnnnnnnnnnnnnnnnnnnnnnnnnnnnnnnnnnnnnnnnnnnnnnnnnnnnnnnnnnnnnnnnnnnnnnnnnnnnnnnnnnnnnnnnnnnnnnnnnnnnnnnnnnnnnnnnnnnnnnnnnnnnnnnnnnnnnnnnnnnnnnnnnnnnnnnnnnnnnnnnnnnnnnnnnnnnnnnnnnnnnnnnnnnnnnnnnnnnnnnnnnnnnnnnnnnnnnnnnnnnnnnnnnnnnnnnnnnnnnnnnnnnnnnnnnnnnnnnnnnnnnnnnnnnnnnnnnnnnnnnnnnnnnnnnnnnnnnnnnnnnnnnnnnnnnnnnnnnnnnnnnnnnnnnnnnnnnnnnnnnnnnnnnnnnnnnnnnnnnnnnnnnnnnnnnnnnnnnnnnnnnnnnnnnnnnnnnnnnnnnnnnnnnnnnnnnnnnnnnnnnnnnnnnnnnnnnnnnnnnnnnnnnnnnnnnnnnnnnnnnnnnnnnnnnnnnnnnnnnnnnnnnnnnnnnnnnnnnnnnnnnnnnnnnnnnnnnnnnnnnnnnnnnnnnnnnnnnnnnnnnnnnnnnnnnnnnnnnnnnnnnnnnnnnnnnnnnnnnnnnnnnnnnnnnnnnnnnnnnnnnnnnnnnnnnnnnnnnnnnnnnnnnnnnnnnnnnnnnnnnnnnnnnnnnnnnnnnnnnnnnnnnnnnnnnnnnnnnnnnnnnnnnnnnnnnnnnnnnnnnnnnnnnnnnnnnnnnnnnnnnnnnnnnnnnnnnnnnnnnnnnnnnnnnnnnnnnnnnnnnnnnnnnnnnnnnnnnnnnnnnnnnnnnnnnnnnnnnnnnnnnnnnnnnnnnnnnnnnnnnnnnnnnnnnnnnnnnnnnnnnnnnnnnnnnnnnnnnnnnnnnnnnnnnnnnnnnnnnnnnnnnnnnnnnnnnnnnnnnnnnnnnnnnnnnnnnnnnnnnnnnnnnnnnnnnnnnnnnnnnnnnnnnnnnnnnnnnnnnnnnnnnnnnnnnnnnnnnnnnnnnnnnnnnnnnnnnnnnnnnnnnnnnnnnnnnnnnnnnnnnnnnnnnnnnnnnnnnnnnnnnnnnnnnnnnnnnnnnnnnnnnnnnnnnnnnnnnnnnnnnnnnnnnnnnnnnnnnnnnnnnnnnnnnnnnnnnnnnnnnnnnnnnnnnnnnnnnnnnnnnnnnnnnnnnnnnnnnnnnnnnnnnnnnnnnnnnnnnnnnnnnnnnnnnnnnnnnnnnnnnnnnnnnnnnnnnnnnnnnnnnnnnnnnnnnnnnnnnnnnnnnnnnnnnnnnnnnnnnnnnnnnnnnnnnnnnnnnnnnnnnnnnnnnnnnnnnnnnnnnnnnnnnnnnnnnnnnnnnnnnnnnnnnnnnnnnnnnnnnnnnnnnnnnnnnnnnnnnnnnnnnnnnnnnnnnnnnnnnnnnnnnnnnnnnnnnnnnnnnnnnnnnnnnnnnnnnnnnnnnnnnnnnnnnnnnnnnnnnnnnnnnnnnnnnnnnnnnnnnnnnnnnnnnnnnnnnnnnnnnnnnnnnnnnnnnnnnnnnnnnnnnnnnnnnnnnnnnnnnnnnnnnnnnccagattcggtttttccccatannnnnnnnnnnnnnnnnnnnnnnnnnnnnnnnnnnnnnnnnnnnnnnnnnnnnnnnnnnnnnnnnnnnnnnnnnnnnnnnnnnnnnnnnnnnnnnnnnnnnnnnnnnnnnnnnnnnnnnnnnnnnnnnnnnnnnnnnnnnnnnnnnnnnnnnnnnnnnnnnnnnnnnnnnnnnnnnnnnnnnnnnnnnnnnnnnnnnnnnnnnnnnnnnnnnnnnnnnnnnnnnnnnnnnnnnnnnnnnnnnnnnnnnnnnnnnnnnnnnnnnnnnnnnnnnnnnnnnnnnnnnnnnnnnnnnnnnnnnnnnnnnnnnnnnnnnnnnnnnnnnnnnnnnnnnnnnnnnnnnnnnnnnnnnnnnnnnnnnnnnnnnnnnnnnnnnnnnnnnnnnnnnnnnnnnnnnnnnnnnnnnnnnnnnnnnnnnnnnnnnnnnnnnnnnnnnnnnnnnnnnnnnnnnnnnnnnnnnnnnnnnnnnnnnnnnnnnnnnnnnnnnnnnnnnnnnnnnnnnnnnnnnnnnnnnnnnnnnnnnnnnnnnnnnnnnnnnnnnnnnnnnnnnnnnnnnnnnnnnnnnnnnnnnnnnnnnnnnnnnnnnnnnnnnnnnnnnnnnnnnnnnnnnnnnnnnnnnnnnnnnnnnnnnnnnnnnnnnnnnnnnnnnnnnnnnnnnnnnnnnnnnnnnnnnnnnnnnnnnnnnnnnnnnnnnnnnnnnnnnnnnnnnnnnnnnnnnnnnnnnnnnnnnnnnnnnnnnnnnnnnnnnnnnnnnnnnnnnnnnnnnnnnnnnnnnnnnnnnnnnnnnnnnnnnnnnnnnnnnnnnnnnnnnnnnnnnnnnnnnnnnnnnnnnnnnnnnnnnnnnnnnnnnnnnnnnnnnnnnnnnnnnnnnnnnnnnnnnnnnnnnnnnnnnnnnnnnnnnnnnnnnnnnnnnnnnnnnnnnnnnnnnnnnnnnnnnnnnnnnnnnnnnnnnnnnnnnnnnnnnnnnnnnnnnnnnnnnnnnnnnnnnnnnnnnnnnnnnnnnnnnnnnnnnnnnnnnnnnnnnnnnnnnnnnnnnnnnnnnnnnnnnnnnnnnnnnnnnnnnnnnnnnnnnnnnnnnnnnnnnnnnnnnnnnnnnnnnnnnnnnnnnnnnnnnnnnnnnnnnnnnnnnnnnnnnnnnnnnnnnnnnnnnnnnnnnnnnnnnnnnnnnnnnnnnnnnnnnnnnnnnnnnnnnnnnnnnnnnnnnnnnnnnnnnnnnnnnnnnnnnnnnnnnnnnnnnnnnnnnnnnnnnnnnnnnnnnnnnnnnnnnnnnnnnnnnnnnnnnnnnnnnnnnnnnnnnnnnnnnnnnnnnnnnnnnnnnnnnnnnnnnnnnnnnnnnnnnnnnnnnnnnnnnnnnnnnnnnnnnnnnnnnnnnnnnnnnnnnnnnnnnnnnnnnnnnnnnnnnnnnnnnnnnnnnnnnnnnnnnnnnnnnnnnnnnnnnnnnnnnnnnnnnnnnnnnnnnnnnnnnnnnnnnnnnnnnnnnnnnnnnnnnnnnnnnnnnnnnnnnnnnnnnnnnnnnnnnnnnnnnnnnnnnnnnnnnnnnnnnnnnnnnnnnnnnnnnnnnnnnnnnnnnnnnnnnnnnnnnnnnnnnnnnnnnnnnnnnnnnnnnnnnnnnnnnnnnnnnnnnnnnnnnnnnnnnnnnnnnnnnnnnnnnnnnnnnnnnnnnnnnnnnnnnnnnnnnnnnnnnnnnnnnnnnnnnnnnnnnnnnnnnnnnnnnnnnnnnnnnnnnnnnnnnnnnnnnnnnnnnnnnnnnnnnnnnnnnnnnnnnnnnnnnnnnnnnnnnnnnnnnnnnnnnnnnnnnnnnnnnnnnnnnnnnnnnnnnnnnnnnnnnnnnnnnnnnnnnnnnnnnnnnnnnnnnnnnnnnnnnnnnnnnnnnnnnnnnnnnnnnnnnnnnnnnnnnnnnnnnnnnnnnnnnnnnnnnnnnnnnnnnnnnnnnnnnnnnnnnnnnnnnnnnnnnnnnnnnnnnnnnnnnnnnnnnnnnnnnnnnnnnnnnnnnnnnnnnnnnnnnnnnnnnnnnnnnnnnnnnnnnnnnnnnnnnnnnnnnnnnnnnnnnnnnnnnnnnnnnnnnnnnnnnnnnnnnnnnnnnnnnnnnnnnnnnnnnnnnnnnnnnnnnnnnnnnnnnnnnnnnnnnnnnnnnnnnnnnnnnnnnnnnnnnnnnnnnnnnnnnnnnnnnnnnnnnnnnnnnnnnnnnnnnnnnnnnnnnnnnnnnnnnnnnnnnnnnnnnnnnnnnnnnnnnnnnnnnnnnnnnnnnnnnnnnnnnnnnnnnnnnnnnnnnnnnnnnnnnnnnnnnnnnnnnnnnnnnnnnnnnnnnnnnnnnnnnnnnnnnnnnnnnnnnnnnnnnnnnnnnnnnnnnnnnnnnnnnnnnnnnnnnnnnnnnnnnnnnnnnnnnnnnnnnnnnnnnnnnnnnnnnnnnnnnnnnnnnnnnnnnnnnnnnnnnnnnnnnnnnnnnnnnnnnnnnnnnnnnnnnnnnnnnnnnnnnnnnnnnnnnnnnnnnnnnnnnnnnnnnnnnnnnnnnnnnnnnnnnnnnnnnnnnnnnnnnnnnnnnnnnnnnnnnnnnnnnnnnnnnnnnnnnnnnnnnnnnnnnnnnnnnnnnnnnnnnnnnnnnnnnnnnnnnnnnnnnnnnnnnnnnnnnnnnnnnnnnnnnnnnnnnnnnnnnnnnnnnnnnnnnnnnnnnnnnnnnnnnnnnnnnnnnnnnnnnnnnnnnnnnnnnnnnnnnnnnnnnnnnnnnnnnnnnnnnnnnnnnnnnnnnnnnnnnnnnnnnnnnnnnnnnnnnnnnnnnnnnnnnnnnnnnnnnnnnnnnnnnnnnnnnnnnnnnnnnnnnnnnnnnnnnnnnnnnnnnnnnnnnnnnnnnnnnnnnnnnnnnnnnnnnnnnnnnnnnnnnnnnnnnnnnnnnnnnnnnnnnnnnnnnnnnnnnnnnnnnnnnnnnnnnnnnnnnnnnnnnnnnnnnnnnnnnnnnnnnnnnnnnnnnnnnnnnnnnnnnnnnnnnnnnnnnnnnnnnnnnnnnnnnnnnnnnnnnnnnnnnnnnnnnnnnnnnnnnnnnnnnnnnnnnnnnnnnnnnnnnnnnnnnnnnnnnnnnnnnnnnnnnnnnnnnnnnnnnnnnnnnnnnnnnnnnnnnnnnnnnnnnnnnnnnnnnnnnnnnnnnnnnnnnnnnnnnnnnnnnnnnnnnnnnnnnnnnnnnnnnnnnnnnnnnnnnnnnnnnnnnnnnnnnnnnnnnnnnnnnnnnnnnnnnnnnnnnnnnnnnnnnnnnnnnnnnnnnnnnnnnnnnnnnnnnnnnnnnnnnnnnnnnnnnnnnnnnnnnnnnnnnnnnnnnnnnnnnnnnnnnnnnnnnnnnnnnnnnnnnnnnnnnnnnnnnnnnnnnnnnnnnnnnnnnnnnnnnnnnnnnnnnnnnnnnnnnnnnnnnnnnnnnnnnnnnnnnnnnnnnnnnnnnnnnnnnnnnnnnnnnnnnnnnnnnnnnnnnnnnnnnnnnnnnnnnnnnnnnnnnnnnnnnnnnnnnnnnnnnnnnnnnnnnnnnnnnnnnnnnnnnnnnnnnnnnnnnnnnnnnnnnnnnnnnnnnnnnnnnnnnnnnnnnnnnnnnnnnnnnnnnnnnnnnnnnnnnnnnnnnnnnnnnnnnnnnnnnnnnnnnnnnnnnnnnnnnnnnnnnnnnnnnnnnnnnnnnnnnnnnnnnnnnnnnnnnnnnnnnnnnnnnnnnnnnnnnnnnnnnnnnnnnnnnnnnnnnnnnnnnnnnnnnnnnnnnnnnnnnnnnnnnnnnnnnnnnnnnnnnnnnnnnnnnnnnnnnnnnnnnnnnnnnnnnnnnnnnnnnnnnnnnnnnnnnnnnnnnnnnnnnnnnnnnnnnnnnnnnnnnnnnnnnnnnnnnnnnnnnnnnnnnnnnnnnnnnnnnnnnnnnnnnnnnnnnnnnnnnnnnnnnnnnnnnnnnnnnnnnnnnnnnnnnnnnnnnnnnnnnnnnnnnnnnnnnnnnnnnnnnnnnnnnnnnnnnnnnnnnnnnnnnnnnnnnnnnnnnnnnnnnnnnnnnnnnnnnnnnnnnnnnnnnnnnnnnnnnnnnnnnnnnnnnnnnnnnnnnnnnnnnnnnnnnnnnnnnnnnnnnnnnnnnnnnnnnnnnnnnnnnnnnnnnnnnnnnnnnnnnnnnnnnnnnnnnnnnnnnnnnnnnnnnnnnnnnnnnnnnnnnnnnnnnnnnnnnnnnnnnnnnnnnnnnnnnnnnnnnnnnnnnnnnnnnnnnnnnnnnnnnnnnnnnnnnnnnnnnnnnnnnnnnnnnnnnnnnnnnnnnnnnnnnnnnnnnnnnnnnnnnnnnnnnnnnnnnnnnnnnnnnnnnnnnnnnnnnnnnnnnnnnnnnnnnnnnnnnnnnnnnnnnnnnnnnnnnnnnnnnnnnnnnnnnnnnnnnnnnnnnnnnnnnnnnnnnnnnnnnnnnnnnnnnnnnnnnnnnnnnnnnnnnnnnnnnnnnnnnnnnnnnnnnnnnnnnnnnnnnnnnnnnnnnnnnnnnnnnnnnnnnnnnnnnnnnnnnnnnnnnnnnnnnnnnnnnnnnnnnnnnnnnnnnnnnnnnnnnnnnnnnnnnnnnnnnnnnnnnnnnnnnnnnnnnnnnnnnnnnnnnnnnnnnnnnnnnnnnnnnnnnnnnnnnnnnnnnnnnnnnnnnnnnnnnnnnnnnnnnnnnnnnnnnnnnnnnnnnnnnnnnnnnnnnnnnnnnnnnnnnnnnnnnnnnnnnnnnnnnnnnnnnnnnnnnnnnnnnnnnnnnnnnnnnnnnnnnnnnnnnnnnnnnnnnnnnnnnnnnnnnnnnnnnnnnnnnnnnnnnnnnnnnnnnnnnnnnnnnnnnnnnnnnnnnnnnnnnnnnnnnnnnnnnnnnnnnnnnnnnnnnnnnnnnnnnnnnnnnnnnnnnnnnnnnnnnnnnnnnnnnnnnnnnnnnnnnnnnnnnnnnnnnnnnnnnnnnnnnnnnnnnnnnnnnnnnnnnnnnnnnnnnnnnnnnnnnnnnnnnnnnnnnnnnnnnnnnnnnnnnnnnnnnnnnnnnnnnnnnnnnnnnnnnnnnnnnnnnnnnnnnnnnnnnnnnnnnnnnnnnnnnnnnnnnnnnnnnnnnnnnnnnnnnnnnnnnnnnnnnnnnnnnnnnnnnnnnnnnnnnnnnnnnnnnnnnnnnnnnnnnnnnnnnnnnnnnnnnnnnnnnnnnnnnnnnnnnnnnnnnnnnnnnnnnnnnnnnnnnnnnnnnnnnnnnnnnnnnnnnnnnnnnnnnnnnnnnnnnnnnnnnnnnnnnnnnnnnnnnnnnnnnnnnnnnnnnnnnnnnnnnnnnnnnnnnnnnnnnnnnnnnnnnnnnnnnnnnnnnnnnnnnnnnnnnnnnnnnnnnnnnnnnnnnnnnnnnnnnnnnnnnnnnnnnnnnnnnnnnnnnnnnnnnnnnnnnnnnnnnnnnnnnnnnnnnnnnnnnnnnnnnnnnnnnnnnnnnnnnnnnnnnnnnnnnnnnnnnnnnnnnnnnnnnnnnnnnnnnnnnnnnnnnnnnnnnnnnnnnnnnnnnnnnnnnnnnnnnnnnnnnnnnnnnnnnnnnnnnnnnnnnnnnnnnnnnnnnnnnnnnnnnnnnnnnnnnnnnnnnnnnnnnnnnnnnnnnnnnnnnnnnnnnnnnnnnnnnnnnnnnnnnnnnnnnnnnnnnnnnnnnnnnnnnnnnnnnnnnnnnnnnnnnnnnnnnnnnnnnnnnnnnnnnnnnnnnnnnnnnnnnnnnnnnnnnnnnnnnnnnnnnnnnnnnnnnnnnnnnnnnnnnnnnnnnnnnnnnnnnnnnnnnnnnnnnnnnnnnnnnnnnnnnnnnnnnnnnnnnnnnnnnnnnnnnnnnnnnnnnnnnnnnnnnnnnnnnnnnnnnnnnnnnnnnnnnnnnnnnnnnnnnnnnnnnnnnnnnnnnnnnnnnnnnnnnnnnnnnnnnnnnnnnnnnnnnnnnnnnnnnnnnnnnnnnnnnnnnnnnnnnnnnnnnnnnnnnnnnnnnnnnnnnnnnnnnnnnnnnnnnnnnnnnnnnnnnnnnnnnnnnnnnnnnnnnnnnnnnnnnnnnnnnnnnnnnnnnnnnnnnnnnnnnnnnnnnnnnnnnnnnnnnnnnnnnnnnnnnnnnnnnnnnnnnnnnnnnnnnnnnnnnnnnnnnnnnnnnnnnnnnnnnnnnnnnnnnnnnnnnnnnnnnnnnnnnnnnnnnnnnnnnnnnnnnnnnnnnnnnnnnnnnnnnnnnnnnnnnnnnnnnnnnnnnnnnnnnnnnnnnnnnnnnnnnnnnnnnnnnnnnnnnnnnnnnnnnnnnnnnnnnnnnnnnnnnnnnnnnnnnnnnnnnnnnnnnnnnnnnnnnnnnnnnnnnnnnnnnnnnnnnnnnnnnnnnnnnnnnnnnnnnnnnnnnnnnnnnnnnnnnnnnnnnnnnnnnnnnnnnnnnnnnnnnnnnnnnnnnnnnnnnnnnnnnnnnnnnnnnnnnnnnnnnnnnnnnnnnnnnnnnnnnnnnnnnnnnnnnnnnnnnnnnnnnnnnnnnnnnnnnnnnnnnnnnnnnnnnnnnnnnnnnnnnnnnnnnnnnnnnnnnnnnnnnnnnnnnnnnnnnnnnnnnnnnnnnnnnnnnnnnnnnnnnnnnnnnnnnnnnnnnnnnnnnnnnnnnnnnnnnnnnnnnnnnnnnnnnnnnnnnnnnnnnnnnnnnnnnnnnnnnnnnnnnnnnnnnnnnnnnnnnnnnnnnnnnnnnnnnnnnnnnnnnnnnnnnnnnnnnnnnnnnnnnnnnnnnnnnnnnnnnnnnnnnnnnnnnnnnnnnnnnnnnnnnnnnnnnnnnnnnnnnnnnnnnnnnnnnnnnnnnnnnnnnnnnnnnnnnnnnnnnnnnnnnnnnnnnnnnnnnnnnnnnnnnnnnnnnnnnnnnnnnnnnnnnnnnnnnnnnnnnnnnnnnnnnnnnnnnnnnnnnnnnnnnnnnnnnnnnnnnnnnnnnnnnnnnnnnnnnnnnnnnnnnnnnnnnnnnnnnnnnnnnnnnnnnnnnnnnnnnnnnnnnnnnnnnnnnnnnnnnnnnnnnnnnnnnnnnnnnnnnnnnnnnnnnnnnnnnnnnnnnnnnnnnnnnnnnnnnnnnnnnnnnnnnnnnnnnnnnnnnnnnnnnnnnnnnnnnnnnnnnnnnnnnnnnnnnnnnnnnnnnnnnnnnnnnnnnnnnnnnnnnnnnnnnnnnnnnnnnnnnnnnnnnnnnnnnnnnnnnnnnnnnnnnnnnnnnnnnnnnnnnnnnnnnnnnnnnnnnnnnnnnnnnnnnnnnnnnnnnnnnnnnnnnnnnnnnnnnnnnnnnnnnnnnnnnnnnnnnnnnnnnnnnnnnnnnnnnnnnnnnnnnnnnnnnnnnnnnnnnnnnnnnnnnnnnnnnnnnnnnnnnnnnnnnnnnnnnnnnnnnnnnnnnnnnnnnnnnnnnnnnnnnnnnnnnnnnnnnnnnnnnnnnnnnnnnnnnnnnnnnnnnnnnnnnnnnnnnnnnnnnnnnnnnnnnnnnnnnnnnnnnnnnnnnnnnnnnnnnnnnnnnnnnnnnnnnnnnnnnnnnnnnnnnnnnnnnnnnnnnnnnnnnnnnnnnnnnnnnnnnnnnnnnnnnnnnnnnnnnnnnnnnnnnnnnnnnnnnnnnnnnnnnnnnnnnnnnnnnnnnnnnnnnnnnnnnnnnnnnnnnnnnnnnnnnnnnnnnnnnnnnnnnnnnnnnnnnnnnnnnnnnnnnnnnnnnnnnnnnnnnnnnnnnnnnnnnnnnnnnnnnnnnnnnnnnnnnnnnnnnnnnnnnnnnnnnnnnnnnnnnnnnnnnnnnnnnnnnnnnnnnnnnnnnnnnnnnnnnnnnnnnnnnnnnnnnnnnnnnnnnnnnnnnnnnnnnnnnnnnnnnnnnnnnnnnnnnnnnnnnnnnnnnnnnnnnnnnnnnnnnnnnnnnnnnnnnnnnnnnnnnnnnnnnnnnnnnnnnnnnnnnnnnnnnnnnnnnnnnnnnnnnnnnnnnnnnnnnnnnnnnnnnnnnnnnnnnnnnnnnnnnnnnnnnnnnnnnnnnnnnnnnnnnnnnnnnnnnnnnnnnnnnnnnnnnnnnnnnnnnnnnnnnnnnnnnnnnnnnnnnnnnnnnnnnnnnnnnnnnnnnnnnnnnnnnnnnnnnnnnnnnnnnnnnnnnnnnnnnnnnnnnnnnnnnnnnnnnnnnnnnnnnnnnnnnnnnnnnnnnnnnnnnnnnnnnnnnnnnnnnnnnnnnnnnnnnnnnnnnnnnnnnnnnnnnnnnnnnnnnnnnnnnnnnnnnnnnnnnnnnnnnnnnnnnnnnnnnnnnnnnnnnnnnnnnnnnnnnnnnnnnnnnnnnnnnnnnnnnnnnnnnnnnnnnnnnntcttcaagttactcgtcgattcnnnnnnnnnnnnnnnnnnnnnnnnnnnnnnnnnnnnnnnnnnnnnnnnnnnnnnnnnnnnnnnnnnnnnnnnnnnnnnnnnnnnnnnnnnnnnnnnnnnnnnnnnnnnnnnnnnnnnnnnnnnnnnnnnnnnnnnnnnnnnnnnnnnnnnnnnnnnnnnnnnnnnnnnnnnnnnnnnnnnnnnnnnnnnnnnnnnnnnnnnnnnnnnnnnnnnnnnnnnnnnnnnnnnnnnnnnnnnnnnnnnnnnnnnnnnnnnnnnnnnnnnnnnnnnnnnnnnnnnnnnnnnnnnnnnnnnnnnnnnnnnnnnnnnnnnnnnnnnnnnnnnnnnnnnnnnnnnnnnnnnnnnnnnnnnnnnnnnnnnnnnnnnnnnnnnnnnnnnnnnnnnnnnnnnnnnnnnnnnnnnnnnnnnnnnnnnnnnnnnnnnnnnnnnnnnnnnnnnnnnnnnnnnnnnnnnnnnnnnnnnnnnnnnnnnnnnnnnnnnnnnnnnnnnnnnnnnnnnnnnnnnnnnnnnnnnnnnnnnnnnnnnnnnnnnnnnnnnnnnnnnnnnnnnnnnnnnnnnnnnnnnnnnnnnnnnnnnnnnnnnnnnnnnnnnnnnnnnnnnnnnnnnnnnnnnnnnnnnnnnnnnnnnnnnnnnnnnnnnnnnnnnnnnnnnnnnnnnnnnnnnnnnnnnnnnnnnnnnnnnnnnnnnnnnnnnnnnnnnnnnnnnnnnnnnnnnnnnnnnnnnnnnnnnnnnnnnnnnnnnnnnnnnnnnnnnnnnnnnnnnnnnnnnnnnnnnnnnnnnnnnnnnnnnnnnnnnnnnnnnnnnnnnnnnnnnnnnnnnnnnnnnnnnnnnnnnnnnnnnnnnnnnnnnnnnnnnnnnnnnnnnnnnnnnnnnnnnnnnnnnnnnnnnnnnnnnnnnnnnnnnnnnnnnnnnnnnnnnnnnnnnnnnnnnnnnnnnnnnnnnnnnnnnnnnnnnnnnnnnnnnnnnnnnnnnnnnnnnnnnnnnnnnnnnnnnnnnnnnnnnnnnnnnnnnnnnnnnnnnnnnnnnnnnnnnnnnnnnnnnnnnnnnnnnnnnnnnnnnnnnnnnnnnnnnnnnnnnnnnnnnnnnnnnnnnnnnnnnnnnnnnnnnnnnnnnnnnnnnnnnnnnnnnnnnnnnnnnnnnnnnnnnnnnnnnnnnnnnnnnnnnnnnnnnnnnnnnnnnnnnnnnnnnnnnnnnnnnnnnnnnnnnnnnnnnnnnnnnnnnnnnnnnnnnnnnnnnnnnnnnnnnnnnnnnnnnnnnnnnnnnnnnnnnnnnnnnnnnnnnnnnnnnnnnnnnnnnnnnnnnnnnnnnnnnnnnnnnnnnnnnnnnnnnnnnnnnnnnnnnnnnnnnnnnnnnnnnnnnnnnnnnnnnnnnnnnnnnnnnnnnnnnnnnnnnnnnnnnnnnnnnnnnnnnnnnnnnnnnnnnnnnnnnnnnnnnnnnnnnnnnnnnnnnnnnnnnnnnnnnnnnnnnnnnnnnnnnnnnnnnnnnnnnnnnnnnnnnnnnnnnnnnnnnnnnnnnnnnnnnnnnnnnnnnnnnnnnnnnnnnnnnnnnnnnnnnnnnnnnnnnnnnnnnnnnnnnnnnnnnnnnnnnnnnnnnnnnnnnnnnnnnnnnnnnnnnnnnnnnnnnnnnnnnnnnnnnnnnnnnnnnnnnnnnnnnnnnnnnnnnnnnnnnnnnnnnnnnnnnnnnnnnnnnnnnnnnnnnnnnnnnnnnnnnnnnnnnnnnnnnnnnnnnnnnnnnnnnnnnnnnnnnnnnnnnnnnnnnnnnnnnnnnnnnnnnnnnnnnnnnnnnnnnnnnnnnnnnnnnnnnnnnnnnnnnnnnnnnnnnnnnnnnnnnnnnnnnnnnnnnnnnnnnnnnnnnnnnnnnnnnnnnnnnnnnnnnnnnnnnnnnnnnnnnnnnnnnnnnnnnnnnnnnnnnnnnnnnnnnnnnnnnnnnnnnnnnnnnnnnnnnnnnnnnnnnnnnnnnnnnnnnnnnnnnnnnnnnnnnnnnnnnnnnnnnnnnnnnnnnnnnnnnnnnnnnnnnnnnnnnnnnnnnnnnnnnnnnnnnnnnnnnnnnnnnnnnnnnnnnnnnnnnnnnnnnnnnnnnnnnnnnnnnnnnnnnnnnnnnnnnnnnnnnnnnnnnnnnnnnnnnnnnnnnnnnnnnnnnnnnnnnnnnnnnnnnnnnnnnnnnnnnnnnnnnnnnnnnnnnnnnnnnnnnnnnnnnnnnnnnnnnnnnnnnnnnnnnnnnnnnnnnnnnnnnnnnnnnnnnnnnnnnnnnnnnnnnnnnnnnnnnnnnnnnnnnnnnnnnnnnnnnnnnnnnnnnnnnnnnnnnnnnnnnnnnnnnnnnnnnnnnnnnnnnnnnnnnnnnnnnnnnnnnnnnnnnnnnnnnnnnnnnnnnnnnnnnnnnnnnnnnnnnnnnnnnnnnnnnnnnnnnnnnnnnnnnnnnnnnnnnnnnnnnnnnnnnnnnnnnnnnnnnnnnnnnnnnnnnnnnnnnnnnnnnnnnnnnnnnnnnnnnnnnnnnnnnnnnnnnnnnnnnnnnnnnnnnnnnnnnnnnnnnnnnnnnnnnnnnnnnnnnnnnnnnnnnnnnnnnnnnnnnnnnnnnnnnnnnnnnnnnnnnnnnnnnnnnnnnnnnnnnnnnnnnnnnnnnnnnnnnnnnnnnnnnnnnnnnnnnnnnnnnnnnnnnnnnnnnnnnnnnnnnnnnnnnnnnnnnnnnnnnnnnnnnnnnnnnnnnnnnnnnnnnnnnnnnnnnnnnnnnnnnnnnnnnnnnnnnnnnnnnnnnnnnnnnnnnnnnnnnnnnnnnagnnnnnnnnnnnnnnnnnnnnnnnnnnnnnnnnnnnnnnnnnnnnnnnnnnnnnnnnnnnnnnnnnnnnnnnnnnnnnnnnnnnnnnnnnnnnnnnnnnnnnnnnnnnnnnnnnnnnnnnnnnnnnnnnnnnnnnnnnnnnnnnnnnnnnnnnnnnnnnnnnnnnnnnnnnnnnnnnnnnnnnnnnnnnnnnnnnnnnnnnnnnnnnnnnnnnnnnnnnnnnnnnnnnnnnnnnnnnnnnnnnnnnnnnnnnnnnnnnnnnnnnnnnnnnnnnnnnnnnnnnnnnnnnnnnnnnnnnnnnnnnnnnnnnnnnnnnnnnnnnnnnnnnnnnnnnnnnnnnnnnnnnnnnnnnnnnnnnnnnnnnnnnnnnnnnnnnnnnnnnnnnnnnnnnnnnnnnnnnnnnnnnnnnnnnnnnnnnnnnnnnnnnnnnnnnnnnnnnnnnnnnnnnnnnnnnnnnnnnnnnnnnnnnnnnnnnnnnnnnnnnnnnnnnnnnnnnnnnnnnnnnnnnnnnnnnnnnnnnnnnnnnnnnnnnnnnnnnnnnnnnnnnnnnnnnnnnnnnnnnnnnnnnnnnnnnnnnnnnnnnnnnnnnnnnnnnnnnnnnnnnnnnnnnnnnnnnnnnnnnnnnnnnnnnnnnnnnnnnnnnnnnnnnnnnnnnnnnnnnnnnnnnnnnnnnnnnnnnnnnnnnnnnnnnnnnnnnnnnnnnnnnnnnnnnnnnnnnnnnnnnnnnnnnnnnnnnnnnnnnnnnnnnnnnnnnnnnnnnnnnnnnnnnnnnnnnnnnnnnnnnnnnnnnnnnnnnnnnnnnnnnnnnnnnnnnnnnnnnnnnnnnnnnnnnnnnnnnnnnnnnnnnnnnnnnnnnnnnnnnnnnnnnnnnnnnnnnnnnnnnnnnnnnnnnnnnnnnnnnnnnnnnnnnnnnnnnnnnnnnnnnnnnnnnnnnnnnnnnnnnnnnnnnnnnnnnnnnnnnnnnnnnnnnnnnnnnnnnnnnnnnnnnnnnnnnnnnnnnnnnnnnnnnnnnnnnnnnnnnnnnnnnnnnnnnnnnnnnnnnnnnnnnnnnnnnnnnnnnnnnnnnnnnnnnnnnnnnnnnnnnnnnnnnnnnnnnnnnnnnnnnnnnnnnnnnnnnnnnnnnnnnnnnnnnnnnnnnnnnnnnnnnnnnnnnnnnnnnnnnnnnnnnnnnnnnnnnnnnnnnnnnnnnnnnnnnnnnnnnnnnnnnnnnnnnnnnnnnnnnnnnnnnnnnnnnnnnnnnnnnnnnnnnnnnnnnnnnnnnnnnnnnnnnnnnnnnnnnnnnnnnnnnnnnnnnnnnnnnnnnnnnnnnnnnnnnnnnnnnnnnnnnnnnnnnnnnnnnnnnnnnnnnnnnnnnnnnnnnnnnnnnnnnnnnnnnnnnnnnnnnnnnnnnnnnnnnnnnnnnnnnnnnnnnnnnnnnnnnnnnnnnnnnnnnnnnnnnnnnnnnnnnnnnnnnnnnnnnnnnnnnnnnnnnnnnnnnnnnnnnnnnnnnnnnnnnnnnnnnnnnnnnnnnnnnnnnnnnnnnnnnnnnnnnnnnnnnnnnnnnnnnnnnnnnnnnnnnnnnnnnnnnnnnnnnnnnnnnnnnnnnnnnnnnnnnnnnnnnnnnnnnnnnnnnnnnnnnnnnnnnnnnnnnnnnnnnnnnnnnnnnnnnnnnnnnnnnnnnnnnnnnnnnnnnnnnnnnnnnnnnnnnnnnnnnnnnnnnnnnnnnnnnnnnnnnnnnnnnnnnnnnnnnnnnnnnnnnnnnnnnnnnnnnnnnnnnnnnnnnnnnnnnnnnnnnnnnnnnnnnnnnnnnnnnnnnnnnnnnnnnnnnnnnnnnnnnnnnnnnnnnnnnnnnnnnnnnnnnnnnnnnnnnnnnnnnnnnnnnnnnnnnnnnnnnnnnnnnnnnnnnnnnnnnnnnnnnnnnnnnnnnnnnnnnnnnnnnnnnnnnnnnnnnnnnnnnnnnnnnnnnnnnnnnnnnnnnnnnnnnnacagtatgggtccaacctggggtcagtgtcctctccccccacggttgcggccccgacggggccagcaggtgtgggcggtgggcgctcgccgatcgctctctctcctagcccatcgcgcatgcttccaggcaggtcaccggcttcgggtaggcgcggcaataccctcagtggctcagtgaagatgnnnnnnnnnnnnnnnnnnnnnnnnnnnnnnnnnnnnnnnnnnnnnnnnnnnnnnnnnnnnnnnnnnnnnnnnnnnnnnnnnnnnnnnnnnnnnnnnnnnnnnnnnnnnnnnnnnnnnnnnnnnnnnnnnnnnnnnnnnnnnnnnnnnnnnnnnnnnnnnnnnnnnnnnnnnnnnnnnnnnnnnnnnnnnnnnnnnnnnnnnnnnnnnnnnnnnnnnnnnnnnnnnnnnnnnnnnnnnnnnnnnnnnnnnnnnnnnnnnnnnnnnnnnnnnnnnnnnnnnnnnnnnnnnnnnnnnnnnnnnnnnnnnnnnnnnnnnnnnnnnnnnnnnnnnnnnnnnnnnnnnnnnnnnnnnnnnnnnnnnnnnnnnnnnnnnnnnnnnnnnnnnnnnnnnnnnnnnnnnnnnnnnnnnnnnnnnnnnnnnnnnnnnnnnnnnnnnnnnnnnnnnnnnnnnnnnnnnnnnnnnnnnnnnnnnnnnnnnnnnnnnnnnnnnnnnnnnnnnnnnnnnnnnnnnnnnnnnnnnnnnnnnnnnnnnnnnnnnnnnnnnnnnnnnnnnnnnnnnnnnnnnnnnnnnnnnnnnnnnnnnnnnnnnnnnnnnnnnnnnnnnnnnnnnnnnnnnnnnnnnnnnnnnnnnnnnnnnnnnnnnnnnnnnnnnnnnnnnnnnnnnnnnnnnnnnnnnnnnnnnnnnnnnnnnnnnnnnnnnnnnnnnnnnnnnnnnnnnnnnnnnnnnnnnnnnnnnnnnnnnnnnnnnnnnnnnnnnnnnnnnnnnnnnnnnnnnnnnnnnnnnnnnnnnnnnnnnnnnnnnnnnnnnnnnnnnnnnnnnnnnnnnnnnnnnnnnnnnnnnnnnnnnnnnnnnnnnnnnnnnnnnnnnnnnnnnnnnnnnnnnnnnnnnnnnnnnnnnnnnnnnnnnnnnnnnnnnnnnnnnnnnnnnnnnnnnnnnnnnnnnnnnnnnnnnnnnnnnnnnnnnnnnnnnnnnnnnnnnnnnnnnnnnnnnnnnnnnnnnnnnnnnnnnnnnnnnnnnnnnnnnnnnnnnnnnnnnnnnnnnnnnnnnnnnnnnnnnnnnnnnnnnnnnnnnnnnnnnnnnnnnnnnnnnnnnnnnnnnnnnnnnnnnnnnnnnnnnnnnnnnnnnnnnnnnnnnnnnnnnnnnnnnnnnnnnnnnnnnnnnnnnnnnnnnnnnnnnnnnnnnnnnnnnnnnnnnnnnnnnnnnnnnnnnnnnnnnnnnnnnnnnnnnnnnnnnnnnnnnnnnnnnnnnnnnnnnnnnnnnnnnnnnnnnnnnnnnnnnnnnnnnnnnnnnnnnnnnnnnnnnnnnnnnnnnnnnnnnnnnnnnnnnnnnnnnnnnnnnnnnnnnnnnnnnnnnnnnnnnnnnnnnnnnnnnnnnnnnnnnnnnnnnnnnnnnnnnnnnnnnnnnnnnnnnnnnnnnnnnnnnnnnnnnnnnnnnnnnnnnnnnnnnnnnnnnnnnnnnnnnnnnnnnnnnnnnnnnnnnnnnnnnnnnnnnnnnnnnnnnnnnnnnnnnnnnnnnnnnnnnnnnnnnnnnnnnnnnnnnnnnnnnnnnnnnnnnnnnnnnnnnnnnnnnnnnnnnnnnnnnnnnnnnnnnnnnnnnnnnnnnnnnnnnnnnnnnnnnnnnnnnnnnnnnnnnnnnnnnnnnnnnnnnnnnnnnnnnnnnnnnnnnnnnnnnnnnnnnnnnnnnnnnnnnnnnnnnnnnnnnnnnnnnnnnnnnnnnnnnnnnnnnnnnnnnnnnnnnnnnnnnnnnnnnnnnnnnnnnnnnnnnnnnnnnnnnnnnnnnnnnnnnnnnnnnnnnnnnnnnnnnnnnnnnnnnnnnnnnnnnnnnnnnnnnnnnnnnnnnnnnnnnnnnnnnnnnnnnnnnnnnnnnnnnnnnnnnnnnnnnnnnnnnnnnnnnnnnnnnnnnnnnnnnnnnnnnnnnnnnnnnnnnnnnnnnnnnnnnnnnnnnnnnnnnnnnnnnnnnnnnnnnnnnnnnnnnnnnnnnnnnnnnnnnnnnnnnnnnnnnnnnnnnnnnnnnnnnnnnnnnnnnnnnnnnnnnnnnnnnnnnnnnnnnnnnnnnnnnnnnnnnnnnnnnnnnnnnnnnnnnnnnnnnnnnnnnnnnnnnnnnnnnnnnnnnnnnnnnnnnnnnnnnnnnnnnnnnnnnnnnnnnnnnnnnnnnnnnnnnnnnnnnnnnnnnnnnnnnnnnnnnnnnnnnnnnnnnnnnnnnnnnnnnnnnnnnnnnnnnnnnnnnnnnnnnnnnnnnnnnnnnnnnnnnnnnnnnnnnnnnnnnnnnnnnnnnnnnnnnnnnnnnnnnnnnnnnnnnnnnnnnnnnnnnnnnnnnnnnnnnnnnnnnnnnnnnnnnnnnnnnnnnnnnnnnnnnnnnnnnnnnnnnnnnnnnnnnnnnnnnnnnnnnnnnnnnnnnnnnnnnnnnnnnnnnnnnnnnnnnnnnnnnnnnnnnnnnnnnnnnnnnnnnnnnnnnnnnnnnnnnnnnnnnnnnnnnnnnnnnnnnnnnnnnnnnnnnnnnnnnnnnnnnnnnnnnnnnnnnnnnnnnnnnnnnnnnnnnnnnnnnnnnnnnnnnnnnnnnnnnnnnnnnnnnnnnnnnnnnnnnnnnnnnnnnnnnnnnnnnnnnnnnnnnnnnnnnnnnnnnnnnnnnnnnnnnnnnnnnnnnnnnnnnnnnnnnnnnnnnnnnnnnnnnnnnnnnnnnnnnnnnnnnnnnnnnnnnnnnnnnnnnnnnnnnnnnnnnnnnnnnnnnnnnnnnnnnnnnnnnnnnnnnnnnnnnnnnnnnnnnnnnnnnnnnnnnnnnnnnnnnnnnnnnnnnnnnnnnnnnnnnnnnnnnnnnnnnnnnnnnnnnnnnnnnnnnnnnnnnnnnnnnnnnnnnnnnnnnnnnnnnnnnnnnnnnnnnnnnnnnnnnnnnnnnnnnnnnnnnnnnnnnnnnnnnnnnnnnnnnnnnnnnnnnnnnnnnnnnnnnnnnnnnnnnnnnnnnnnnnnnnnnnnnnnnnnnnnnnnnnnnnnnnnnnnnnnnnnnnnnnnnnnnnnnnnnnnnnnnnnnnnnnnnnnnnnnnnnnnnnnnnnnnnnnnnnnnnnnnnnnnnnnnnnnnnnnnnnnnnnnnnnnnnnnnnnnnnnnnnnnnnnnnnnnnnnnnnnnnnnnnnnnnnnnnnnnnnnnnnnnnnnnnnnnnnnnnnnnnnnnnnnnnnnnnnnnnnnnnnnnnnnnnnnnnnnnnnnnnnnnnnnnnnnnnnnnnnnnnnnnnnnnnnnnnnnnnnnnnnnnnnnnnnnnnnnnnnnnnnnnnnnnnnnnnnnnnnnnnnnnnnnnnnnnnnnnnnnnnnnnnnnnnnnnnnnnnnnnnnnnnnnnnnnnnnnnnnnnnnnnnnnnnnnnnnnnnnnnnnnnnnnnnnnnnnnnnnnnnnnnnnnnnnnnnnnnnnnnnnnnnnnnnnnnnnnnnnnnnnnnnnnnnnnnnnnnnnnnnnnnnnnnnnnnnnnnnnnnnnnnnnnnnnnnnnnnnnnnnnnnnnnnnnnnnnnnnnnnnnnnnnnnnnnnnnnnnnnnnnnnnnnnnnnnnnnnnnnnnnnnnnnnnnnnnnnnnnnnnnnnnnnnnnnnnnnnnnnnnnnnnnnnnnnnnnnnnnnnnnnnnnnnnnnnnnnnnnnnnnnnnnnnnnnnnnnnnnnnnnnnnnnnnnnnnnnnnnnnnnnnnnnnnnnnnnnnnnnnnnnnnnnnnnnnnnnnnnnnnnnnnnnnnnnnnnnnnnnnnnnnnnnnnnnnnnnnnnnnnnnnnnnnnnnnnnnnnnnnnnnnnnnnnnnnnnnnnnnnnnnnnnnnnnnnnnnnnnnnnnnnnnnnnnnnnnnnnnnnnnnnnnnnnnnnnnnnnnnnnnnnnnnnnnnnnnnnnnnnnnnnnnnnnnnnnnnnnnnnnnnnnnnnnnnnnnnnnnnnnnnnnnnnnnnnnnnnnnnnnnnnnnnnnnnnnnnnnnnnnnnnnnnnnnnnnnnnnnnnnnnnnnnnnnnnnnnnnnnnnnnnnnnnnnnnnnnnnnnnnnnnnnnnnnnnnnnnnnnnnnnnnnnnnnnnnnnnnnnnnnnnnnnnnnnnnnnnnnnnnnnnnnnnnnnnnnnnnnnnnnnnnnnnnnnnnnnnnnnnnnnnnnnnnnnnnnnnnnnnnnnnnnnnnnnnnnnnnnnnnnnnnnnnnnnnnnnnnnnnnnnnnnnnnnnnnnnnnnnnnnnnnnnnnnnnnnnnnnnnnnnnnnnnnnnnnnnnnnnnnnnnnnnnnnnnnnnnnnnnnnnnnnnnnnnnnnnnnnnnnnnnnnnnnnnnnnnnnnnnnnnnnnnnnnnnnnnnnnnnnnnnnnnnnnnnnnnnnnnnnnnnnnnnnnnnnnnnnnnnnnnnnnnnnnnnnnnnnnnnnnnnnnnnnnnnnnnnnnnnnnnnnnnnnnnnnnnnnnnnnnnnnnnnnnnnnnnnnnnnnnnnnnnnnnnnnnnnnnnnnnnnnnnnnnnnnnnnnnnnnnnnnnnnnnnnnnnnnnnnnnnnnnnnnnnnnnnnnnnnnnnnnnnnnnnnnnnnnnnnnnnnnnnnnnnnnnnnnnnnnnnnnnnnnnnnnnnnnnnnnnnnnnnnnnnnnnnnnnnnnnnnnnnnnnnnnnnnnnnnnnnnnnnnnnnnnnnnnnnnnnnnnnnnnnnnnnnnnnnnnnnnnnnnnnnnnnnnnnnnnnnnnnnnnnnnnnnnnnnnnnnnnnnnnnnnnnnnnnnnnnnnnnnnnnnnnnnnnnnnnnnnnnnnnnnnnnnnnnnnnnnnnnnnnnnnnnnnnnnnnnnnnnnnnnnnnnnnnnnnnnnnnnnnnnnnnnnnnnnnnnnnnnnnnnnnnnnnnnnnnnnnnnnnnnnnnnnnnnnnnnnnnnnnnnnnnnnnnnnnnnnnnnnnnnnnnnnnnnnnnnnnnnnnnnnnnnnnnnnnnnnnnnnnnnnnnnnnnnnnnnnnnnnnnnnnnnnnnnnnnnnnnnnnnnnnnnnnnnnnnnnnnnnnnnnnnnnnnnnnnnnnnnnnnnnnnnnnnnnnnnnnnnnnnnnnnnnnnnnnnnnnnnnnnnnnnnnnnnnnnnnnnnnnnnnnnnnnnnnnnnnnnnnnnnnnnnnnnnnnnnnnnnnnnnnnnnnnnnnnnnnnnnnnnnnnnnnnnnnnnnnnnnnnnnnnnnnnnnnnnnnnnnnnnnnnnnnnnnnnnnnnnnnnnnnnnnnnnnnnnnnnnnnnnnnnnnnnnnnnnnnnnnnnnnnnnnnnnnnnnnnnnnnnnnnnnnnnnnnnnnnnnnnnnnnnnnnnnnnnnnnnnnnnnnnnnnnnnnnnnnnnnnnnnnnnnnnnnnnnnnnnnnnnnnnnnnnnnnnnnnnnnnnnnnnnnnnnnnnnnnnnnnnnnnnnnnnnnnnnnnnnnnnnnnnnnnnnnnnnnnnnnnnnnnnnnnnnnnnnnnnnnnnnnnnnnnnnnnnnnnnnnnnnnnnnnnnnnnnnnnnnnnnnnnnnnnnnnnnnnnnnnnnnnnnnnnnnnnnnnnnnnnnnnnnnnnnnnnnnnnnnnnnnnnnnnnnnnnnnnnnnnnnnnnnnnnnnnnnnnnnnnnnnnnnnnnnnnnnnnnnnnnnnnnnnnnnnnnnnnnnnnnnnnnnnnnnnnnnnnnnnnnnnnnnnnnnnnnnnnnnnnnnnnnnnnnnnnnnnnnnnnnnnnnnnnnnnnnnnnnnnnnnnnnnnnnnnnnnnnnnnnnnnnnnnnnnnnnnnnnnnnnnnnnnnnnnnnnnnnnnnnnnnnnnnnnnnnnnnnnnnnnnnnnnnnnnnnnnnnnnnnnnnnnnnnnnnnnnnnnnnnnnnnnnnnnnnnnnnnnnnnnnnnnnnnnnnnnnnnnnnnnnnnnnnnnnnnnnnnnnnnnnnnnnnnnnnnnnnnnnnnnnnnnnnnnnnnnnnnnnnnnnnnnnnnnnnnnnnnnnnnnnnnnnnnnnnnnnnnnnnnnnnnnnnnnnnnnnnnnnnnnnnnnnnnnnnnnnnnnnnnnnnnnnnnnnnnnnnnnnnnnnnnnnnnnnnnnnnnnnnnnnnnnnnnnnnnnnnnnnnnnnnnnnnnnnnnnnnnnnnnnnnnnnnnnnnnnnnnnnnnnnnnnnnnnnnnnnnnnnnnnnnnnnnnnnnnnnnnnnnnnnnnnnnnnnnnnnnnnnnnnnnnnnnnnnnnnnnnnnnnnnnnnnnnnnnnnnnnnnnnnnnnnnnnnnnnnnnnnnnnnnnnnnnnnnnnnnnnnnnnnnnnnnnnnnnnnnnnnnnnnnnnnnnnnnnnnnnnnnnnnnnnnnnnnnnnnnnnnnnnnnnnnnnnnnnnnnnnnnnnnnnnnnnnnnnnnnnnnnnnnnnnnnnnnnnnnnnnnnnnnnnnnnnnnnnnnnnnnnnnnnnnnnnnnnnnnnnnnnnnnnnnnnnnnnnnnnnnnnnnnnnnnnnnnnnnnnnnnnnnnnnnnnnnnnnnnnnnnnnnnnnnnnnnnnnnnnnnnnnnnnnnnnnnnnnnnnnnnnnnnnnnnnnnnnnnnnnnnnnnnnnnnnnnnnnnnnnnnnnnnnnnnnnnnnnnnnnnnnnnnnnnnnnnnnnnnnnnnnnnnnnnnnnnnnnnnnnnnnnnnnnnnnnnnnnnnnnnnnnnnnnnnnnnnnnnnnnnnnnnnnnnnnnnnnnnnnnnnnnnnnnnnnnnnnnnnnnnnnnnnnnnnnnnnnnnnnnnnnnnnnnnnnnnnnnnnnnnnnnnnnnnnnnnnnnnnnnnnnnnnnnnnnnnnnnnnnnnnnnnnnnnnnnnnnnnnnnnnnnnnnnnnnnnnnnnnnnnnnnnnnnnnnnnnnnnnnnnnnnnnnnnnnnnnnnnnnnnnnnnnnnnnnnnnnnnnnnnnnnnnnnnnnnnnnnnnnnnnnnnnnnnnnnnnnnnnnnnnnnnnnnnnnnnnnnnnnnnnnnnnnnnnnnnnnnnnnnnnnnnnnnnnnnnnnnnnnnnnnnnnnnnnnnnnnnnnnnnnnnnnnnnnnnnnnnnnnnnnnnnnnnnnnnnnnnnnnnnnnnnnnnnnnnnnnnnnnnnnnnnnnnnnnnnnnnnnnnnnnnnnnnnnnnnnnnnnnnnnnnnctttcctccttgcaatnnnnnnnnnnnnnnnnnnnnnnnnnnnnnnnnnnnnnnctgccgtctcattcatggcctcaagtgctgcatctctcctggctgccatctatctttccttctctcttttcatcttcagcaacttcatggtctggttgccttcatttgtagctgttgttgtctgtgctaaagtgtgagaagttgctgccagtgagatgaatgatgaatctggcaaaatgctttcagtatcttctctaggaacaggtctggattgttgcatcctatccagcattgtaaatccaaagtgccgcacctgtgcaaaacaatcatcacatgctagtatcagtacaacaaaaaaggaatgggcctgaaaatacaactaaagaaggaagggacaaaagtagagaatttgcctaaaaaacaactggtgtatctactccatcatcttgtgtgacaatgacctcctcatgtgtatcttggtcatcaacattgacctcctcatgtgtaacttggccatcaacatggacctcctcatgtgtaacttgaccatcatcttgtgtgccatgaacctcctcctgtgtaccttggccatcaacttgttgtggcagaacaagttcatcatctgacacatcatcaggaatgtcccttggaccccttcttgttgttctctctgctagatttggcaaaatgccaacctttctttgattacatcctttgatgttgtggcctgattcatgacagtatgaacatgttattatgattccatgtctgctcatcaccttggttccatctttctttttaatctcataaggctgctttctcctactcttgtttgaaggccttcctactttttttcatagacaggtggcttgatttcacaaccattcatcttctgccactcactcctatctctgcaaggcttgataatgggtttgtatgctagcttgaatgcttctatactgtaacaggagttcaccaaactctcaggatcaatctctcatgcctgtagcatgcaattgcatcgtgacatggaactccactaagatcccaccttttgcatgtacagctttcttccttcatgtcaacaatgtatgtcctgttcttgttgtcaacctgaaagatgccatcaccagcccctgaaatcatgcatgtagctgacaactctatattcttctcaattcttttcctaatttttgggcatattgagccaggccaggtctctgcctcnnnnnnnnnnnnnnnnnnnnnnnnnnnnnnnnnnnnnnnnnnnnnnnnnnnnnnnnnnnnnnnnnnnnnnnnnnnnnnnnnnnnnnnnnnnnnnnnnnnnnnnnnnnnnnnnnnnnnnnnnnnnnnnnnnnnnnnnnnnnnnnnnnnnnnnnnnnnnnnnnnnnnnnnnnnnnnnnnnnnnnnnnnnnnnnnnnnnnnnnnnnnnnnnnnnnnnnnnnnnnnnnnnnnnnnnnnnnnnnnnnnnnnnnnnnnnnnnnnnnnnnnnnnnnnnnnnnnnnnnnnnnnnnnnnnnnnnnnnnnnnnnnnnnnnnnnnnnnnnnnnnnnnnnnnnnnnnnnnnnnnnnnnnnnnnnnnnnnnnnnnnnnnnnnnnnnnnnnnnnnnnnnnnnnnnnnnnnnnnnnnnnnnnnnnnnnnnnnnnnnnnnnnnnnnnnnnnnnnnnnnnnnnnnnnnnnnnnnnnnnnnnnnnnnnnnnnnnnnnnnnnnnnnnnnnnnnnnnnnnnnnnnnnnnnnnnnnnnnnnnnnnnnnnnnnnnnnnnnnnnnnnnnnnnnnnnnnnnnnnnnnnnnnnnnnnnnnnnnnnnnnnnnnnnnnnnnnnnnnnnnnnnnnnnnnnnnnnnnnnnnnnnnnnnnnnnnnnnnnnnnnnnnnnnnnnnnnnnnnnnnnnnnnnnnnnnnnnnnnnnnnnnnnnnnnnnnnnnnnnnnnnnnnnnnnnnnnnnnnnnnnnnnnnnnnnnnnnnnnnnnnnnnnnnnnnnnnnnnnnnnnnnnnnnnnnnnnnnnnnnnnnnnnnnnnnnnnnnnnnnnnnnnnnnnnnnnnnnnnnnnnnnnnnnnnnnnnnnnnnnnnnnnnnnnnnnnnnnnnnnnnnnnnnnnnnnnnnnnnnnnnnnnnnnnnnnnnnnnnnnnnnnnnnnnnnnnnnnnnnnnnnnnnnnnnnnnnnnnnnnnnnnnnnnnnnnnnnnnnnnnnnnnnnnnnnnnnnnnnnnnnnnnnnnnnnnnnnnnnnnnnnnnnnnnnnnnnnnnnnnnnnnnnnnnnnnnnnnnnnnnnnnnnnnnnnnnnnnnnnnnnnnnnnnnnnnnnnnnnnnnnnnnnnnnnnnnnnnnnnnnnnnnnnnnnnnnnnnnnnnnnnnnnnnnnnnnnnnnnnnnnnnnnnnnnnnnnnnnnnnnnnnnnnnnnnnnnnnnnnnnnnnnnnnnnnnnnnnnnnnnnnnnnnnnnnnnnnnnnnnnnnnnnnnnnnnnnnnnnnnnnnnnnnnnnnnnnnnnnnnnnnnnnnnnnnnnnnnnnnnnnnnnnnnnnnnnnnnnnnnnnnnnnnnnnnnnnnnnnnnnnnnnnnnnnnnnnnnnnnnnnnnnnnnnnnnnnnnnnnnnnnnnnnnnnnnnnnnnnnnnnnnnnnnnnnnnnnnnnnnnnnnnnnnnnnnnnnnnnnnnnnnnnnnnnnnnnnnnnnnnnnnnnnnnnnnnnnnnnnnnnnnnnnnnnnnnnnnnnnnnnnnnnnnnnnnnnnnnnnnnnnnnnnnnnnnnnnnnnnnnnnnnnnnnnnnnnnnnnnnnnnnnnnnnnnnnnnnnnnnnnnnnnnnnnnnnnnnnnnnnnnnnnnnnnnnnnnnnnnnnnnnnnnnnnnnnnnnnnnnnnnnnnnnnnnnnnnnnnnnnnnnnnnnnnnnnnnnnnnnnnnnnnnnnnnnnnnnnnnnnnnnnnnnnnnnnnnnnnnnnnnnnnnnnnnnnnnnnnnnnnnnnnnnnnnnnnnnnnnnnnnnnnnnnatagtccatggctctgtgtttacaattcccaagtcactcttcagatttgacagaaaccgtttccatgtgtcattattctctacctcaacaactgcaaaagctagannnnnnnnnnnnnnnnnnnnnnnnnnnnnnnnnnnnnnnnnnnnnnnnnnnnnnnnnnnnnnnnnnnnnnnnnnnnnnnnnnnnnnnnnnnnnnnnnnnnnnnnnnnnnnnnnnnnnnnnnnnnnnnnnnnnnnnnnnnnnnnnnnnnnnnnnnnnnnnnnnnnnnnnnnnnnnnnnnnnnnnnnnnnnnnnnnnnnnnnnnnnnnnnnnnnnnnnnnnnnnnnnnnnnnnnnnnnnnnnnnnnnnnnnnnnnnnnnnnnnnnnnnnnnnnnnnnnnnnnnnnnnnnnnnnnnnnnnnnnnnnnnnnnnnnnnnnnnnnnnnnnnnnnnnnnnnnnnnnnnnnnnnnnnnnnnnnnnnnnnnnnnnnnnnnnnnnnnnnnnnnnnnnnnnnnnnnnnnnnnnnnnnnnnnnnnnnnnnnnnnnnnnnnnnnnnnnnnnnnnnnnnnnnnnnnnnnnggttgtattttttatcatgaagcagttgattctcccatcaaatgatgcagacaaggtccaagggcacccatcttcacaaatggcattgagtattttcctatcatttctggggcatttaatgtcaactctctcctgacaactgtactctttgatagctttcctaaggaactcaatagatccaaaggtctggccaacatgaaactgtggtttagtgaggtcttcctctctaaaacttttgaaattcagcttccccttatcttcatcagaagaaggcagacacatatccacatcttcagtaggatcatcatgttcttcttgcaatgctactcctttacctttctcacaatcaacatttctggcaaataattcatcatcgtcttcaatatcaatgtttgaatcaacaagctgaggattgtattcttcatctgaaccatggattactaaatcaccaactgcatctgttgcatccatgttcaaaaacctacaggatcttctggccctaaacccaaactgagatgaaaggtaagtagttcctggctggggtggacttggtatgaaatcatcttcttctgactctgttccactttctgactctgattcatctagctcatgctcttgatcatgctcaggcagctcctgttccacttgaggcagctcggcctgctcctgttccactagagtgagctcagcnnnnnnnnnnnnnnnnnnnnnnnnnnnnnnnnnnnnnnnnnnnnnnnnattctccttcttgggcctaatgccactgaacctggcaactggaggatgctcatcatcagagtgaacaggaacaggagaaataaatgatctcattctctcatcatgatcaaggaaaatctgttggaagtggttgccattcatagcacaatccttcattttttctgtcatagtgttgtcccctaacttaatctctcttaatccattcttgtagactgtcaacccaggaacacaccagtaagccctgatcctgccctcaaactcatatccaatttcctccactagacaggcaacaacattaggtgtccaactatctatgtcacagtaatcataccaaatggagtgacctttgtgataatccctatgctttccagcacaaagaaaatagccaccatgtatgacctcaatagagaagtggttgcttaagggtcctggaaaacaatcaaagtgaaaaaagttcagacatttcagacaaatgcaagtacagagaggttcagacagtacagaattcagcattttcagtaacaaaagcagagattcctggcctccaattaacaaatgtatgatcttacagttcataaagcaaccatctttggtaaaccagagctaatgtaattacaaattaaatgcaggtcacaccaaatgaactatgacactgaaatcaacatttactgcttaaaccctaggcccctggacccatgacaaattggtggagaaagaaccctaaccactccaggtctctacaacaactgtgaannnnnnnnnnnnnnnnnnnnnnnnnnnnnnnnnnnnnnnnnnnnnnatggaccccccccccccccccatcctaacacaggacgcaacactatttttggcctgccactaagttcatcaagaactgctaaaaccctaccatccacacccaatctagcagaaaagtacaacaaaagcccaaaccctagctcgtacgcgcaattgatcccaccaggaattgtctaccggagcaaaattctacagatcgagcaccggagctgctggcgacggcaccgtaccatatagtggcggcgaggcatcatcacgatgacgcgtaagagcaagaggaacgtcacgcgggcccctcccgaacggcgcggacggcggcggctcagcgtccgacgacgtgctcatcgagccgtcgtcgacgccaacgagctcgaagacctcggcagcgacgacgagcagagagggtgcggtaggagagggagacagcaagcgggtgcgggaggagagggagacagacaacgagctggtgcggtccgaccaggtggctgtgatttatggtcatggtgtttttgcaaannnnnnnnnnnnnnnnnnnnnnnnnnnnnnnnnnnnnnnnnnnnnnnntttttttcaaannnnnnnnnnnnnnnnnnnnnnnggatggactactattgaccctagctcgacaaggtggcggtcaaaaccgagctggcgggcgctaactcggctaagttagcgaatacgtagacgaagtcgtacatacggaccaaagtgaacccctagcgcaagtatttggaccgtagttcgggtattttgaagtagtggtgctaaagtgtcacccgacgcaagttatgtgacctagagtgatttttttctcttttcttttttgttcaacgaccaaattaaatccccgccaaaatggccgagnnnnnnnnnnnnnnnnnnnnnnnnnnnnnnnnnnnnnnnnnnnnnnnnnnnnnnnnnnnnnnnnnnnnnnnnnnnnnnnnnnnnnnnnnnnnnnnnnnnnnnnnnnnnnnnnnnnnnnnnnnnnnnnnnnnnnnnnnnnnnnnnnnnnnnnnnnnnnnnnnnnnnnnnnnnnnnnnnnnnnnnnnnnnnnnnnnnnnnnnnnnnnnnnnnnnnnnnnnncgtgttgtactttttttaaggaactatatgctgaattttaataggaattaataccggatatgaacactccaagccaaacatgacggcctacatcaagtgagagagcaaatttcgctaagtttcttttcaacaattatgcacagttttagtgattaactgaaatgtttataagatttaatacatgatcgtgaggcactttaagccaaacatggcagcctacattgaaagagcaaaaaaatctctactacctaaaagaaacgtaaggttccctctcccctcttacgtcgccgcgcttcgtccgtccgtccgacctggttaaaaaacgaatccctcgttcacaggatccggatgacgtaacttccggtctcctctgtctttaggagagcgtgctcaaaatcccccttgaccccgtgtgcatcaggcaactccacgaccccaccgccggcctccgccctctccgcaccggcgannnnnnnnnnnnnnnnnnnnnnnnnnnnnnnnnnnnnnnnnncatatcaagaagggaggccatggtgctcccgacacggctggatccagaccaagctcgtggggttccagctcgacctcctcgcagcgaccacggcggcgggatccgcggatccatggccacggcggtgcgagcgcgcagatgcagccttgagaagagaggaggcagggcggccatggcgttcccgccgcagccgggtcactggctccaccacgagctcctcgcagttgccagtgatgacgacggctccgaaccctagcggacgctcctgctcgccttcctccacacctctgctcgtgcccgtcttcctcggcgccatattcagcacctacaagaacgcagcttcctctttcgcgacaggggatggtaactcctcaaaccccccatccttccttcccttccactctgctccgtgatgcaaaattttctctttttttcatgattcaccactcgtaatggagttgcaagcaggaaggtcgtgggtcaggcatctgtatgtgctgctgaatttgattgatggttcttgattgttgagtaattcctgttagttggagaaaatccaggtgagcggttgtatgttggcgctggctcaacctggagtcctctttaaaatgtctaatctgagaaaaaaaggaaacactagcgggcagcacatatgagcacgggctcgttcaatgcgtatgggtagggcggcgccgccgccaccgatctacgcagcggccggtctacttctccggccatctgccgccgccggtcggattcctcctgctcaagtgcctctgatttggatcgaagtcacggcggcagtgggggaggaggcgaaggtggtggcgatgggtggtgaggcctgaagatgaggttgtcctggtaggaggatgccggggacgggcagcgcgattagagtggcgcatcgaagttggagaccggcgtgtgtttcagcaatgggtggaggggcagccgcgcggtggtggggagcagcgggtctgtgtccatggccggaccattggggctggcggtttcttcccagattgttgatgaatatacttggggattcgtgattcttgtgtcccttgatgtggtgcaagattcattgggatttggggcgaggaagatgggggtgcgattcggggggatcatgcctcggattcttggggtcgccggggatatggtgattgaaggagaagacggtnnnnnnnnnnnnnnnnnnnnnnnnnnnnnnnnncttctgatttcaaaaagagacttggctcgttcgatactgtcaattccttggtgctgattttgagttgttaagcacccttgattgatgcaaatcttaattttgttttatgtggagcatcagtttggggatatcttgttaaacatccagttccctgacatgcatgaactgttcagtataggatgcccatcttatgcagctatgtttgctctgtttacattgttttctatcatgtgttatgtttgcaacatttccctatgctctgattgataatatatattttgatgtttttgcctaatttgtgtgttcctttgttttgtaggaacctgtcaaatcttggtctgaagggaatgttatctcctgagattggacagcttactaatatgcattttctgtaagcatattctatagttcctctggcgacgtttttttctgaacacttgtgaaatgatgttcgcccttcaaacttttccgatctattttccttccatccatacagtgtactgcacaggaacttgttctatggtattatccctagagagatgggagatttatgagagctgaaggtgttggatctggggtacaataacttcaatggatcaattccatcagagctaataaacattttatccctggaattcatgtgtgtgcgaactttgataattttttttcatttctgtttaacttcaaaacttgactgaccttactatttgaattgcagctttcttaaaagaaacagactttattgtgatttacctcttgaactaaatgagctcatcagtctgtgtgagtctcaggttcgccacggcaggactttctcaaataggatgcccgctgcaaggtttgtctaagttttcttctacttgcatatctgagagttaaactcgtgattatgcaaggcttgagttaaattttcaaatcaaacagggatttgagcaagcttgattttggttaaaaaatcccaccctgatcctgcaatcacatgtatgttaatgatatatgaaatatttgagaattatctgtttcgactcaagaaatatcagacttcttttaggaacatttcctccacaaaatggtaaattatatccgagtcggcatccctgaaacccagcccaaatccccacatataacctcactccggacgaaccctagacccaaatctctagacaatgccatgttgaaagataggcttgcgaacattcggctcaagaattccggagggtacttctgtctttatcatatttgttctcacaccttggtcgttgttttttcccgccacaacgcacgcttcgacccacggtcctcatattaagtgaaccagaagcgatacatgcgagagaaaagaaaaacaaacccaaccaccagcacgacccttcctctcaatcccatctggacctttagtattctcgggatatatctgattatgatgatgttccgtactgctctggagccgacaagtttttggactgctcgatgtttataaccaatgagactacttttttggttgttggctggaggctggagctatcacnnnnnnnnnnnnnnnnnnnnnnnnnnnnnnnnnnnnnnnnnnnnnnnnnnnnnnnnnnnnnnnnnnnnnnnnnnnnnnnnnnnnnnnnnnnnnnnnnnnnnnnnnnnnnnnnnnnnnnnnnnnnnnnnnnnnnnnnnaaccgtattatgtaaaatgtacagaaaacgcacttttagaacatatacagtttgttaggcatccatccttcctagcactgaatctctcatctctcatccctctatactaaagaacagtgcatccaagatccaactgccatgtacatagtcatacagaatagtgaacgaagaatgaaacaaaaaaacgagacagagaatgggagatggggataacttaattctcagttacattgagtgaatgttcagtttcttccgtggagactggagaagacaccgccgagcgctgagatgccgcaacggaccgacggtcgctgctgagttgcttgccgatttggaaagttggatgttgtcgaagagtcgcagctcgaacgttagtgggcgccgccgcgccggacggatggtcgggggcctgctcctctggtgatctggtcctctctccttccttgcgtacagcgagaccagcgacggtggtccgtgagaannnnnnnnnnnnnnnnnnnnnnnnnnnnnnnnnnnnnnnnnnnnnnnnnnnnnnnnnnnnnnnnnnntcaaccactcatcagatgagaagatgaggcagcagctgactcggggtggactggtggtgccgtgtgtggtggtagaaaggaaggggcgcagcggcaggatctctggagtagtggagttcgtgggtgcctgggaggaatcgtggctgcgatctttttttttttttttagcataatcgtggctgcgatctaggtcaaggcgtgggagtgggtgggcttgcctgggccatacgccatgggccgggcctttcggtatttttggttaaccgaaagannnnnnnnnnnnnnnnnnnnnnnnnnnnnnnnnnnnnnnnnnnnnnnnnnnnnnnnnnnnnnnnnnnnnnnnnnnnnnnnnnnnnnnnnnnnnnnnnnnnnnnnnnnnnnnnnnnnnnnnnnnnnnnnnnnnnnnnnnnnnnnngctatcactatgactgaaattttcttttcaccaaagtaaatttatatggtcatcaaaaaccaatgacaggtcaacacttgtcagcagtttgcaattcgtattacagtatgcgtaagccaatggtcggacattgttgttttagttaggaaatgtagaaaacgtgttcatgatttatgtagattggtcagtcccttcaaacagtattcgatcttgagtggacaatcttactatatgtttccttatagaaaattgactatatgttccatgaattgactgattagtttggcccgatcagattaaactaggtcttgatttgaaggtccagttaggtcagctggtgctggtttgtttgttgtaatactaactatgctatttagacagagacatgtcgtctttctcattcctcgacattttcctttgctaccaagttttttcattctaggttgtggaaaaacggatgtagcattccttctacaagttgtcatgagctgggacatagaagaagagaaccgacgagaagttgcacagcagttcgctccggtgtcgctgccaatggcattgcgcaaagtgcagattgcaggctagatgcgtacgagtccgtccctacgtccacgatgtcgaagcataggaaatcaagtcaattagatagtatatctggttatgaaagttgtcttttgtgtacgcagttttgccattattttgtaaaagctttgagtttttgataatgtaattgtcttactaataacactcttaatcaattcgtgacaaggccaatagccgagttatgcacaaattgttcatgtttccttgatgactgctattgtcagaagatttttttcagcatttaagtaatacagatcccactttcagtatgtatgcaaaggccagtagcaaggtaatgactgctccttgcaggtaggatatttcctatttccaggctttatctcattctgcttttcacaccatgctgatttgggaatgagaacctacatgatcatctaccctgatttttaatttgtagtcacatccagacactcaggtacgcaatatagttttgctctttttgtgtgattgtcagcattccccactgtttcttacaatcagagaaaaacaaaaggagattttactctacaatggatgtctttctcccaggcatatgtaattccgctgctctgattgccatctatctttgatggcgacgatgctttacctcaacgcagtccaagtctacctccaccaggtatggtgccgtgaggaaacacccaaggtaaatgtgtgcgcgcgcgctaatatagattaactacagatatgtacatccaaggtaaatgttgatatgtacatccaaggtaaatgtgtgtgtgcgcacgctaatatagattaactacggatatgtacattgaacccgtgagtgatcaccgtgtaaatcagcagcagccagcagtacacgaattctcttataaatactgaaaaaaaaatatcctacttactttaactcaaaattaagctactattgttctaaaaatattagaattacttgactttgaaaacaatattctggttgaatttgaggtgaccagcatatacttaatgctttagtttaatctttcaaagtggaagtttaaaatatttattttcaattttatatggtggataaattatttgtctataaattattatggatttttaaataactttaacattaattttaaatccatattgataaaaggcactcaaaatcaaaannnnnnnnnnnnnnnnnnnnnnnnnnnnnnnnnnnngtttggaacaaccattaggagccgccgaaactagcataggaggtttgagaaagagctcccagggttaatacgccgacgtggtcgaccaacggacgacgtggacgctccgacaaggtcgagcgagcggctaagcttagccgtgctacaaatggacgtgtgttgaaatagatggtatggatttgtgtaggtctatagtcatgcttactgtgggaaggaacatctgatatttctttttcacacgttgcatcacatagtctttccaaagagcaaaatatgaaagtgattaatcagactaatccatgcaccactactcttccatcaaatgaaggacatcagggtgatttcttgatgttccaaattcatgctttgaaaaatgataatcaatttaaatttattactacatttatcagaaatggatatacgaaatgtgagtaatcgcatgtgtagcaggttttgcgatttttttgcccgttgcaacgcacgggcatttgtactagtaaaaaataaaaaaaattaggcctttccttcctgcctcttgtgacctctcagttaaggttcccttcctctcacctgcggtcctaattttaagtgaaaaaaaaatgattcgctatttctggacacccccccccccccccatcttttagttaatcannnnnnnnnnnnnnnnnnnnnnnnnnnnnnnnnnnnnnnnnnnnnnnnnnnnnnnnnnnnnnnnnnnnnnnnnnnnnnnnnnnnnnnnnnnnnnnnnnnnnnnnnnnnnnnnnnnnnnnnnnnnnnnnnnnnnnnnnnnnnnnnnnnnnnnnnnnnnnnnnnnnnnnnngtgnnnnnnnnnnnnnnnnnnnnnnnnnnnnnnnnnnnnnnnnnnnnnnnnnnnnnnnnnnnnnnnnnnnnnnnnnnnnnnnnnnnnnnnnnnnnnnnnnnnnnnnnnnnnnnnnnnnnnnnnnnnnnnnnnnnnnnnnnnnnnnnnnnnnnnnnnnnnnnnnacgcatgatccatctttctttcatacggtgtaggtcgggttagaaatcaacaccttagcaaacctagtttggagaagaaagaaatcatctatatataaccacgcaggcacgactcggtaaaacctcaaggtgagaaaaggtagatttctcatcttatgtggagagaaaaaaagacactttagaattggccacattcaagagcgttgtgagtgtgagcattaaggccgccgttgacaagggtggaaaggagggtaagcggtgacatagatgagatgcatgtggacccattgatgtctttagtcatgattattttgttagggacgtgtggtatatttttttccattgcgacgcacggggataataaaggagctattgcttctggcgacacatcactgaaaattgcccccaaaagttacaaaatattacccgccgatgccacctgtaactgataaaaaaacgtttcacccaggaggatcctcacctaggtcggcccatgcagtacaaaccttctaaactgtgctccgcatgctgggagaagacacaatacgcctgtttgtttcggcccatgtccaggaggcctgttttttatatttcattctcttttctgtcttcttttttctactttaaataatttgggaattgaaaaaaagttccaaactcaaaaactctgcaaatcttaattttttataattaataaatgtttttagattgagaaaatgtttgcgatttttaaaaactgttcacatattgaaaaaatgttcataattttcgaaaacaatattcaggaactaaaacaatattcatgattttttaaaaaaatcatgtattaaaaatgttattcaaattgaaaaaaaattcgccaattaaaaaaatgttcatgaattgaaaaatatcctaagaattcaaaactgtttgtgacatacaaattagattattgattcataaaatgttcactgattcaaaaatgatcatgcatttcaaaaaatgttagctaatcaaaaaaatgttcatgaatttcaaaaattgttcccagtcaaaaaaaattcaaaaattgttaaaaaaaattcaaacaaatgtttgtccattctagaaatgttcgcctatttttttgtgaatagtaataaatgactgtgaattaaaaaatattcatgattttagaaaatgttcaaaatcgccaaaaatgttcatgatttcagatatgttgacgagtttaaaaaatcgttcatgattttcaaaacttgttcacaatgtcacgaaaatgagagtgatggtgtatctaggtgatgcaacaaaatgtggtcatggccatcggagattatgattttttttcccgttgcaacgcacaaaccgttttactagtaaactataatattccagctaatatattttagacatacaactactttaaaactacaaatttgatgtagaaaattgaggtgaagtcctatccgcatttgtaattttctagtaatgtcatatgctggtacagattgttgtgttgagttaccacagctctcattttcataaacttccgtgatggtcaatcacaggaaaatgcagatgtacccaaaaatgcatagatttcgaattagcaaaactagggatcaaaggatgaacaaatggatgcggtgttagtgttactgttacccggcacggcttcggtgttgccatggatagaacatggtggatccgtggctgacggtgcagatggcggcgatgttgcaaggcctgcccacgcaactcggctgtggcggccgtactggaaaccatcttgtatcttcttaatatgcatcgactgcacaacgactgttgtttccttgaaaaaagcaatgtatgctagagagaaatgagcactgaaacagagaaacactacaccagctagagagaagcaacagcccggtaagctgtagtaaatgaggcacgcgctattatcaggactgagaaattgaagactgaagatccccgagtcaatttctgtaactttgatccttgaatcaccaagcactgccatcgatgctggaatcaaaattaggtacgcgccgtctacgggcggtcggtcatgtaattcaaaactcttcttaattaatgagatgaggcaaatcttttgcctccgttttgaaaaaaaaaaattaggtacgcatgcatctatggttgctatacttttaacagtacagtagtgatagtttcttttttatatcaacagggaggaatgaagcctgccagcaggtccattcctcaaagtagagaaaggcaaacagtagtgatcgtggaactggacctaattgttgatgttgctcaagtagtagtaattcagagaatgacagtgaattttgggtacttgaaaattacattatagcaatgatgaattaatctccagtaagcatctttgtattgcattgggcatatcaaaatttgtatccgaattccaacaaaacccccggtaaaaaaaaaagaattccaacaaaacaaaatttagaagtctagtaaatatacatacatttatagcaaaccaatcagatgtagatagtcaccacatcatcctgttactacatgccttgtgccggtgtcatccatctgtaataatgtatctcttaccaaaagtctccgactcctctagattttcctcctagattttgatttctcaagtcggagcaaaccaacaaggcagtaaaagatggatggctgactctgtatgctactgcgccactggaattccatggctgatcttaggaaggattgagttaagatgtctctcttagttctgttaagatcatggcaatttcttaccgtcatctttcttatcaattcgaacaggattactgtcccaaacaggacttcatgtttgcaaactcttcagtttgcatcaactgaccaatgcaaattattacagctatgctttgcaaactcttcagtttgctggatttgatcgtacagactggtcatgtagttgggatccttttgccgtctgataactgatgaaggtggtatgtctgattagggtcttaactggagcgccaactgaacccatggaaaaggaaagcaatgaatgaaattcgctgctacagttgtccttgagtagacctgattcgatcagattgggatttccattttcgtaactggtaatcagcaacttgtgttccgcgcgcaggtcagaccgggagggatcggttcttccattctactaccagtctaccacagtccattgcaaattcttctcttcagtgaatatataaactgacggacggagacacaaataggccgtgttgccgtcttttcatcagcaaataagaggacagactacatgacaacacttgtcttcaccaaatagatacgagacctaaatgaaaaagaaaaactcatgcatcagcatcagaatagtctttactaaaagatagagaaaaatacacaatactctcagctaaaagatagtactaatgttttgcttagctaactgctagcggttgtatcagttatctgtctttgggagttaaatcgatcagttaaaggttgcttgatacattctgctgagaagaagcgaatggtttcaggttccttgatagattgagctgagaagaagtgaatggtttcagtttgctgaaatgaagggactaacaagacctgccatactttgtagcatgaacatcaatcacccttgctatattttacacaggatcgatgacgaaatgttccagagctgttgtcgcttgtcagttgaggaagagcgaaacagacacactctctctgttgtgcacattacattgttctgatgtggtgtgtcaagaggaagcaacgtcttaccatcggaaatacaaaagcggaaaacatgggaaactctgtttcaagactattactggagtttcacggacgatctcaggaataataattgacttaaaatacgagtcttagttctcaggaatacattttctcataccagttaactggtagtagcactaagtactgagaaatggccctccttacgtctgaacgagttaattaatattacatgggaattgccatcacacctccaaccaacaagccagataataagaaagaaacacacagactctgttttactactactactgaagctctgctaagatcgaggtgtttctcctaataacaattgcgtggactcttaccattgaattcgtttttccagacatacaaaagcttactgccaatccacgaagtacagactacatgacaacacctgtctttgacaaatacagtagatgggcataacttagaaagaatgttgagcttcagttcatgatgcagcgtcaaagtaggcttccctttcaccagggttgctctgcatttgtgcatttaaaagctccaatcacatccagcaggatgtagggctctgtagtcgtttttggtgtcactgggttttcgccccatggcggactgctcgatgacgggtgtccgtcgtgggtttcccagtgatgctttgaacccgctttttcccctttctaggcttcctggttactatgtgggactggttgtatttccgttatgatgagtaatgggaaggggttatcgcccggttcaaaaaaaaaaaatcacatccagcaggatgtagctccccttttacctgatcaaaccaaagttttaattatatcacttgtcagatatacgaccatgcaccaaagttttttcagtctgacccgtgccagcttgtgacttcatgcgctgtatgtatgtaatctctaattaggcagctttattatctagtttctgcctttgatactacatctggctcatgcactagggatcctttgccccgtctgataattaacgaaggtggtatgcctaatttggatcttaatttgagcaccaatgtacgcttcgagctgctgtctgcgaaattaaccgcagctgaacattgtttgcagtgacatagggcccctattgagaaaggcttcttcaggaaccttgatagcttcctgggtgaatgaagccgagcggatgacatgacggacgaattcttcaaatcaactggatttccttgagcacacctacacctgagtacctgacacttcatactgggaccccattttcccttctcgtgattgataatcaccttgatcagcaattgattcatcatcactaattttgtgaataaaagaaacctcaaaccgcatatggaaaaacagcttttgcttgacttgtgaagttacatgctggtgtccattctactactctccaattcctaggttttgatttctgaagtcaaagcaagcaaactgaagaagtctccagataaccaaagccaagcaagaaattcgttcnnnnnnnnnnnnnnnnnnnnnnnnnnnnnnnnnnnngccgactctgttttactactgctggagtttcatgaatgatctcaggaataatataattattgacttaaaaaatactaccagtatttgttgttttacttttcctcatagtatcagttatttgggcatcacacctccaaccaacaagccagctgctnnnnnnnnnnnnnnnnnnnnnnnnnnaatgagtctgttttactactactggggttgcgctaaagtgttctcttcacattttctcttaccattttatctgtagtagtaaatgcagtactgtcaaatggccctcagtgtctctgagactggagtcaagctgatctattcattattgttgcattatggaattcatcgatagttcccaaattgaataaatacttgcacaaacatacgtatgtcataaaaaaagatagtcttcaagcagctacactacatcgtcgtttctcaacacaacaaagcttgctgccaatccacaaagtacagactacatagcaacactctgtctttgccaaatagatagatgaccaaaattaagaaagaatgtcgaacttcagttcatgctgcagcgtcaaactagcacgatgtagtttcccttgcacctgatcaaaccagcacaatcgatgctggcttccctttcacctgatcaaacccaggtttcaattatatcagatacatatgaccatgcacccgggtttaacatatcaagaagtttcaagtttccacgcatagtatagctgctaactttattgaccagacagatcacgcatgctattatatgaaacattggctaaagcaattgccggtacagagtatcagtcaacgcactgcaattaatatatggtaaccaagggagttaatcatttcaagattatcactagcattacagccatatcaaaagaacaaaccaagaaaagagaactctgatttttctggatggagggaataacaggccttgaagcacagggggctagcacctagcagtagtacctagttaatgatctcttcatctgttgttcttgtatgcgcttcttgtttcttgttttcacccactgggcctgatgaagctccttcattatcctctgcgtccaccagaaagaaatagggtttaatatatcaacaattttcatctccattggctaaagcacagatgctattaaatgaaccattggctaaagcaattgccagtacagagtatcaattaccattctttcggagttatgtgatcaatatatagtaaccaagggcgttaatcggttcaagattctcactagcattagtgccatatcaaagaacaaaccaaaaaagagaactctgatgtttctggatggagggaataacatgacttgaagcacattgtgctagcactagtacctagttaatgatctcttcatcctccgttcttttctgcacttcttgttccttgttttcatcccctgggcctgatgaacctgcttcatcatcctgatctgcatcgaccaggaggaaattaatatgacaaaaattactggacagagcaaccagacgatcaaaataagatgtaggagaagttatgctaattcacctcccgattcagatgacctgctggccaagaagtgttgcgacagcatatccctcgccctgacagcgtcctcatttgctaactggcgcacttcctcagagtaattcctccacttggggctcgacatggctgcatcatcctccatttctatgactatgttatgaaacgtgcagcagacatatatcattctacttaaaatttccagatcggcaagccaccacgcctctccttgcaggcatttccatgtatctttgagccttgccagcgccttcagagcacaggttgtggttgcagaatgtctcctattgaactctgccttggaatctgagaggtcttcttcctggtaaggtgtgagtagccatgggagaagaggatatcctgtatcaccaactatgtattccccgacttctgatccatctaatgccaccttcaacttgctgccattcagccaattacccttctcacacttcttgaagagatcagagtcatggaaaaggctcgactggttcattctacttgccggtcccaaccaactgttcttgatcctcatgtctggatcaatgacgagctgcatctgaatgctatcattcttcccatggttgtagtttggtccaaatgggatgtgcgttgtacatataaccccgcaacagttatgcatattgtggatcttgtcaaacttggatttgatttcatccttttcactggagtctggccagttcgagtggtgctgcgcccgctcccacatagcttcaacgaacctctcagttaccaacaagattatcgactcgctcacaccaacagaggatcctatggtctctgttggctcactagactgcaaccttctcagagcaacggctactcgatcttctaaagacaacacccttccatcaacaaaggtgtagctattcatatcttccattgacggccccatcaccaagctgcagatgtagctaaaggttttccttgtcattttgaagagagactcaaatctttgtgcgtcctcaaaagaagtcaaggttcctgcataggaagaaatagtaaaagtggttacacaatccataacctgcaaggcaagagctcaagtctgacagagttccagaaataacatatgagcaggggaagtggggaacttgtgagacaatagaaacttagtaaatgaaggactccagccaaatcagaaagtagcattggtcaacaaatagcaaaaacaaaacgataaaaagccagtcatctattttctcttagagaaaaagctagtcatacatctagaaggagggtgtatcaaaaggaatgaaggaatatattcaaactcctaacatactgatgaaaggtagaaaagaaagggaatagtttaaataaccagaatataaatagaaaaaataaaatgaacgagcaaggctatacctctggacatgaaagagtggttgttgatattcgtctccaagttgtatgggttagctgtgtacaagacataccatttccttggattatctccttcgcgtgcatatgccttgacatgctcaatatggctaaacttgtcccactcagggccagattgtgccacgaccatggaagcaagtagtgacaggatgcagtagagctccaaacgccttgggtttatacttcccatgtattttgggagtgtttccatgtcgtcatcttcgagcatcagcctctgtaatacaggaacaccctccaacgccttcaactttgggcaatgggtgacagtaagcttctgcagcttgggaagattggtgatcctctccaagtcaaagttctcaatcacttgcagctcaataagggaagtaatgttctctagagagatgagacccttgacctgttgtaaggatagcacattcaaagccctggcatgggaggcaaggccaggaggaagacaactcaatttgcattcaaacagaataagctccttcaaggaaggaaaggcttgcacttggtcctcccacctccactcctcccattccaccatccccattaacttcatcgtgtgcaatctcagaaatgaaaccaccgcctgggaaggatgaggattctggccatggtaggacagtaggaactcatgtccaacacgcttgatggctggggcatggcaaatctgaaggaactccaaatatgggagctgacacaagccatcaggaagttctgtgcaccaagccagatcttcaaccatcagaatcctcaagcttttgaggggtacatctgatgatgacatcatccaccttgggtgccatcggccaaaatagccttcgatggcaagaaaactcaagttgggcggagggcagagctcatcaaacacattcttgattcgttggctctcttcctcggggaagatgtccccaaatttactaccgcatgttaagcacaggttcgtaagatgtgccttctcaacaagcttcgcccttgctgcgagcgaggaagcagttacattctccaacccctgtatttcgagatacctaagccgagaaagagaacccaactcttctaagctgcaccagtcaccatccacccaagccggaaacccatttaatttcctcaaatttgtcagaacacagaaccccctaggtatggcacttatacttgtttcatgtaggttaaggtaccttagctgccctaactttacaatgctaggtggaagttccacaaattggtagcatcctctaaggctaatgtgctgcaagaatttcatttttccaatgctttctggcagtctacatatatcagagtggtctaaggacaggtacctcaggtgcttgaatttatgcaaagattcaaccaacataacatgtgcagactctatatgtagagtccgtagacatggaaaataattaaccaatgaatcacccggcttccactttgtatagccaactgatattagtgttctcaacatgttctgtgcttgtaaagaactccaacctaacccatctgattctaatgctttgctttctagtgacaaccgaagaaacttttgtgcactaagtttactaacaatattggtttcactgtgagctgctagtgcctcatctctagccacaaattgagcaaatgaccgaacgacatcatgcatgttgcaaaataattgatcgatgtactttgaatctggctctataaggttcctttgtattagctccttataatacttccttcctaattcttctaagttgtctgagggtccatgaaggaatccttcactaatccacatgccaattatgtcgtctcttagaaatgttccagatttagggagaagggagtaccatagaaagcattgtttgatgcaagaaggtaaatcttcatagcttaaatatactgcatggtttagctcttcaggcattccagatactgaccatatagaatcatccagaaccatcttccagtcatggtgatgattatccttttgacacaagagtcctcccattactttgagagcaagaggcaatccatcacattttgctacaatttgcaagccaatatccttgagcatatcaatctcacatacgtctgtctcacttgagactatctgtaagaagtttaaacccatcgaattagtaaggagcggtttgtcttaaaagaaaatagtgatctgattagcagccagtagcaattcagttttagttaatataaccaaacttcatggttaattatgtgagtgaacattacaatatatacatccatacttagaaaacagagtaatatctgtcatacaaccgcgagaacaaaccataggtttggaagctagctagcggatgtggttgtaccccaagcgggatcaaaccccagagttgacatcacgcgtgtgtctgcctaggaggattattcagtccaaggtaaagttcccgtcaatagagagacacatgtaggggtttttctttttgtcttttgaggaatagcagtagatcttgaagatccgctactccagttttaagatggcgtcgtgatgtgtgcatatgctataaattgtacatggtttttcttagaaacatacttatttgccttgttataatctggacttgcgaaaataagcagaattattgatgatcatggagtctgagtatgtacctgtttcttcagcaatgaccaggcatcctcctcctctaatttgtcgacatggtggtagggaagctcagctttcatccctcgagctactctttcatctctagtagtgacgaggactcggctacctcgagccacaacattagatacaagtgtttcaagcacatcgccccatgctctgtggctccatacatcatcaagaaccaacaatagcttcttccctttcaaagtagcggtaaggattggctgaagcacagccaacgccgtttcaccaccatgtactcccccagagagggtgatgattgtcttgaggagctcgaccttgtcaaagtcctggttgatgcttaaccatattgtcttgtcgaagttggatttcatattttcgtcattgaagatcttctgggcaagagtagtcttaccgatcccgccgacaccaacgatcgcaaccaccatgatgttgttattgctctctttttctgtcagcatgatgtcaacaagctttcttgtgtcttcttcgatcttctcgccaactaaaccagaccggttaaactctccacctgtctcacgcctgggattaccagaatgagaagcttgcgccttgctgcggcggtcttcacatgaactgagattgataagctttaaaggagtgatgcgctcgtagatgctatcgagtttcttgttgagcaccttgatgcggctaccaattacatgagcatgatggggattccgcaggcaaaagagcaaggggttgaagcacccaacatttatggtggatggaccacgatccatggccttgagttggcagaggtcaaggatgtcgacagcttcgtacatgatgcgcttgagctgcgccacccactcttgcacactcacttcggtgatgtttttcctatcagcgtcagcgaggaagttcttgagatccccaagcttgacatccatcttgtcaatctcatctcctactccaaggagcatgtgcacctcttcttttgccatctcggtcagcatgttttgcacataggatgcaaaggcatccaggaccatcgccatttttgctgcgtttaactgaaagaagagttaaccacatatcctaatcatccccgccattcattgcagctaaagattaccaaaaacaaatattgaaaaaggcagcactagaatgctaacacgtacatgggaacaagttttaatttataagaataggcaaactacctagatcaacagatgcacgcaaaaccacctaaacatagagtgatccaaaattaccttcaagatggattgatgttgggtcctgctctagctcctcttgaggaactcgtagtagtggggaagggctagcaagggcaggaccttgtatatataagccaaaggaaaattaattagttctccaactccatcatggtttctagattacaagcaacttgtatgtgattattatgttggttaatatgtctcagtctctataattatctaactcgcgcattgcaagttgctaccaaccaatctattgacgtgcatgctatatttccacaaataaaattacatgtgagtgttgttccgttgtgattgacagcgccatggcagggaagatgaaccacaccaactttgatcaagcatagatacccagcaacacacatgtacacgccgggatccagatcgattgatctcgccggaatacgcgacacgggcaacacgagttgatacggtcctgttgattctgggttcaattgtaggggcaggttacatgtatataaatagaagctaagctagnnnnnnnnnnnnnnnnnnnnnnnnnnnnnnnnnnnnnnnnnnnnnnnnnnnnnnnnnnnnnnnnnnnnnnnacctcgaatatagattaagaagcaggcggacaccagcagtcggttggtaaaaagaactgtgcctaggttggtactcacctgagcgaagtttagatctgtacgtatggttttgttttttatttatgagctacccacctcatctacaagactgcaaccaagaggttcatcatttaaagtcttcttgaaatttcttgctccatttattcctgcaggtgtatgtagatatgctattttactcctagcctcttagnnnnnnnnnnnnnnnnnnnnnnnnnnnnnnnnnnnnnnnnnnnnnnnnnnnnnnnnnnnnnnnnnnnnnnnnnnnnnnnnnnnnnnnnnnnnnnnnnnnnnnnnnnnnnnnnnnnnnnnnnnnnnnnnnnnnnnnnnnnnnnnnnnnnnnnnnnnnnnnnnnnnnnnnnnnnnnnnnnnnnnnnnnnnnnnnnnnnnnnnnnnnnnnnnnnnnnnnnnnnnnnnnnnnnnnnnnnnnnnnnnnnnnnnnnnctgaaaaaatgaacctgatcaacttcttcaagtatataaatggagagcttgtaggaatagcaaagaacaactaatttaatcatagaccaaataatgaggggagcaagtgatgcaatttactctgaaattgtctgtttgttcggaaattagcgatgaccaaaagacttattgtggtttggtttcgtggttcacactagcctaacttgctacacgacaccatactacaatggaagtctttctggtgggcacccattgattgctctgttgctcatagcactgaagcaaggaaaacgaaggcactgctggaacctagacaaaccccatgatttggagatactagcctaatagcctttgatacattgctacgaagcctgattaattagcactaatataattgtcatcatcttctacgctgcacccacctcacataaattgcacaaaagattattttcttgtcagagattaagttgtgagaatactgacacaaatgacaaccagaaagcacaggatgcattctaaaaaaagcaggatggtagagagagatgaccacacgctgtagctaattaagattaccaaactaatatgattacatgatgaacacgttataagcatgagaagcaacagaaataggcaacttaaggcacctagatcgatttatgcaagcaaagccagctgaacagaggagatctgatattaccttcaagatggatggatgttgggttctcctgctcctactggtaaaggtctaaaatggacagagcactgggtatataatccaaagggaaattagctctccgaaggcaaaaatgtaggcagataaccctgagcatgacaaacgatttacctggaactgcagggagcatgagctgagagtagacccacaagcccttgcttgtggtgattcctctaaacaaaagcatgccactcaccgcacgcagcatgtgaccatggcgcaatggctgctcctcggggaagtccgcttgagcaagtgcgcccctctcgcaccctagaccagaatgatgggcagaaaaatattttatggatgatttccatacagatgcagaatggcttgttagtagagatgggcctgtattcccttcaaaagaagagatggagctgtattagtattaggagggggtgggtagtatgcagagctcattgagaggaagatggctttgcatgtttagcttttctttaatatcagttgggtggattatcatctagattcgcgctaaagccgacatcgacaggtcataatttgatatataacattcttggagagttgattaactttagtgcatgtggttgttgttctttttgctcatgaagttaaagtaatcatctagatccacgcctgcagcagcctggaatctttgctcggcccatttgtgcaagattaatggagtaggtaggggattcagaatcaatttcacacacgtcggagctgtcagtcgatgcgatccaacagtaaataaatgaaaacaacgaagaaacccaaaattcgagtcagtgctcactagctcgatcaccttgccaccgtcgcagcagccgttgcttctcccggcggcagcgactgcatcctcaactgctccagaaccgggtcggccgtctggactccggagcgacagaagagaagaggaggaagcggcgagcggaaggagggaagggattggggtttgggcaagggagttggatgcggggaggagccatcggaggtagagcgcctgcgacggcagagcagatgggtatggggatgtggcggcgatttcatttggtttcagtcgaaaagagaagaaggttttcctgaaaaaaaaaaacaggttgataaatacatatttttatttcgtggctcaactttcattttagtccttaacgcaaagttgtcccgctgggcagggcgttttggctccggccaatttctgcaagatcataggcaatcagaatgagtttatttgtgactctgggttgctacttttaattaaacagtagtgataggggaacatgacctaatgattgctgtgttttaagtataatcagaggtttcnnnnnnnnnnnnnnnnnnnnnnnnnnnnnnnnnnnnnnnnnnnnnnnnnnnnnnnnnnnnnnnnnnnnnnnnnnnnnnnnnnnnnnnnnnnnnnnnnnnnnnnnnnnnnnnnnnnnnnnnnnnnnnnnnnnnnnnnnnnnnnnnnnnnnnnnnnnnnnnnnnnnnnnnnnnnnnnnnnnnnnnnnnnnnnnnnnnnnnnnnnnnnnnnnnnnnnnnnnnnnnnnnnnnnnnnnnnnnnnnnnnnnnnnnnnnnnnnnnnnnnnnnnnnnnnnnnnnnnnnnnnnnnnnnnnnnnnnnnnnnnnnnnnnnnnnnnnnnnnnnnnnnnnnnnnnnnnnnnnnnnnnnnnnnnnnnnnnnnnnnnnnnnnnnnnnnnnnnnnnnnnnnnnnnnnnnnnnnnnnnnnnnnnnnnnnnnnnnnnnnnnnnnnnnnnnnnnnnnnnnnnnnnnnnnnnnnnnnnnnnnnnnnnnnnnntactcgctgtcgtcgacgcggtagattcaacgccgctccacctgccaacctccacaccgtcgccgctgcaggaactgccatgtagagcccaccacccacattacctctccccctaacacccaagcctcccaagacgacgcctccatggaggacacgacgctaagggcgccgccgcagcccaatccaagacgaattttggactttcatccgggagtggtcagaggtggataggaggggacctcggcttcgcctccaaggagggtaacgacgccaaagccatccccgatgccgggtcgagctagccgacgaaagtttcctccggtccccaatcggtaccaccaacctctgtctgctccggatctggccacaaaccgagaaacgaaaccattcggagaagaaagcaccatggggcgactctnnnnnnnnnnnnnnnnnnnnnnnnnnnnnnngaatccaacctgggcaacgacgagtaccaccaccccgcactagccaccggcgtccaagcgccagaccgcgaaaaatttgacccgaatgtgacggctcacgcagccaccaaatcctgcgttgtcgcagccgccaatccgctctgcaagcgtgaactccatccatcggcgcgtcgtgcatgacgccgcctggatccacccgcagcaccgccaaaccccacggtagtccggcgccacttcacgcacaggctgtcccatgccagccaggatcacgcgtaggggagagatgccccgccgccgcccttgccggccaggcttcgcccggcggccctgttagcggcggcgagggtgagggaggcaggggagagacgcccgacggcggtggcgcctagggtttccccctggccgcccatgggggcgaaccagggggttacgaggaggtcagtgaaaagaaaagaagtttgtcagccaagtatatttagaggtgtcagtgtttcattctactaacagtgaatttgggtacttatgaatacaacgaannnnnnnnnnnnnnnnnnnnnnnnnnnnnnnaaaaaaaaaaaaaaaannnnnnnnnnnnnnnnnnnnnnnnnnnnnnnnnnnnnnnnnnnnnnnnnnnnnnnnncaaaagaaaaaaagaaatgacatgttgagtcgtggattattcgtcacactgatctgttagctctggcagcttagctagctggtgaacagtataatacatacaattgattccgcctctaatatataagcaagcggacaccagcagccagtggataaaacaaactgtgcctacatattaatcagtgccatggcaagggaagatgagccatgctaactttgatcaggtataaactaatgattagagcctgcaggcatggattattcatcacagtaattgatctattagctggaagctagcgggctggtgaacagtaaaatataattgatgctgatgccttggccaacattaagaagggagcagtcaccagccagttggtaaaggaaaactacacctagatatatgttctttatgagtcagtagtcagtacttacccaattcaagtttagacctgtatggccttttttctttgtatgactcagcagtcatctgaggtttgtcatttgaagtcttcttgaaatttcttcttttcgctcttcaaatatgagagttgtggactgctgcagaattcgttgaaatacatacagggaagcactatgacatttactatattattagattcacacacattcaaaatgcacccattaattaactactttatgagatatatttatatctattcctggtgtatgtagatatgctatctactcctaccctcctaggtgttgtacctttcttagttttctttcttaaaatatgaacctgattaacttgttcacatatagaaattgagaacttgtggcaatagcaaaacacacctaatttactctgaatttgtctggttgttcagaagctagccataaccaaaaaggctttgtgattcggtttcatggtttcacgttagcctaatttgctgcacaacaccttacactatagtaaagaccattctggtgggcatccattgcttcgctcatactcccttcgcnnnnnnnnnnnnnnnnnnnnnnnnnnnnnnnnnnnnnnnnnnnnnnnnnnnnnnnnnnnnnnnnnnnnnnnnnnnnnnnnnnnnnnnnnnnnnnnnnnnnnnnnnnnnnnnnnnnnnnnnnnnnnnnnnnnnnnnnnnnnnnnnnnnnnnnnnnnnnnnnnnnnnntagaaggtagtgccacaggcacagaagaagcaaagaaagcagaggcactcccggaacctagacaacccccgtgatttggagatgctagcccatagtattggatactttgctatcaagactcgttaattagcactaattgtcaccatcttctacctgcctaacacttggagtaggaggaagtaatacctgctgcctcccacttggagtaggagaaggtaatacctgctgcctcccacttggagtagaagaaggtagtgcatagattacaaagaaaaaatatatttctgttcagagagattaggccgtgagaatactagatacaaatgagagctagagagcaagaattgggagaaatgaccactgaaacagagaaaaataataggtagagcctagagtgaaatgatcacgctatttgtgccaatgatgcctcggtaataagagagaaagaagttggcagctatgaagcacaaggcttcctgtaaattgtaaaactgaggtaagtatctgctatatatatgtggcacggtctgattgagcacagcgaacttgcctgaggttctgatattttgactcatggcaatttccttggacttgttgcaaggtaatcccgatgctcctggaattctatgaccgtgcttgaaactgtttcaccatgtgcataacctaggttcaaacttcaaagtgctctgttttctgtgatatcccactggcaaccgatgtgacctgcagtagatgagatgaggcactgttatcagggccgtagaaattgaagactgggatcactgggtcaatttctgtaaggtcctcatcaggcactgtcatcagtgggaatcaaataatttttgcttgattgtatggttgctgtacttacttctgaatagtggtgatggcagagttggacttttaatggttgttgttgttcaagtagttcagagatgtcagtgttgcaatgaatttgagtaccactttataaagattttattatgttgcgggaattagtaaggatctaaacgcaaactcaggcactgccaaatatgtttgacagccggtaaaccaaagagacgaaaaaacagtaacacgaaatgcaaaccacacgtgaactgaattagacaaacgaattagcaaaattacgggtcaaatggtgaatggagcctgagtgcgcatgcggtgttacccggcggcgtagatggacagacgacggtggctgacggtgcagatagcagcggcgttgccaaagtgccacgcctgtcctccagcatcggccaatagcaggacccgtggaagcggtgtcggtcggtgaagtaggcgcctgtcaggacgtgcagtggacagtggggcagcaaaaatgctacacacacggatctttacaagggaattacgggctccttcctcctcactaaactatgcccctcctgattttcagctgggtggggccagccctccccccttaatccaatcacagtgtcccatctctaatccaccccgtaatgagccagtaaaggtccgtggatgtagcattgcctgtggggcagcccccgtacttctcgccgcactgcgcggcccccatcccactccagcgcacggccctcctttggtggcggcggccgcgcacaagcatccatccgagcagagtcgctctgacgacgccgccgccggcgacttcccgcagtcgtcggtccaacaaagggccaattccagcaacggcagtaacccaatccaggcccacggcgggtgttccaagaaaatgcattcgaaaaagggagcaactagagcgctcgtaacgagcggtttgggagcgccccgcgcgtgacaagtgttgcgcgcggagcgctcccgccagagaaaaccaggtggcgctgttggttcccgattttccctttctagtttgtggtttcaatgatgccttgtgccaataatgccttggtaataagagagaaagaagttggcagctatgaatcaaaagacttcctgtaaattggagaacacaggtaactttctgctacatataagcacagggaacttgcctgaggttctgatattttgactcatggctaatttcctgggacttgttacaaggtaatctccacgctccttgaactctttgtgcataacctaggttcaaacttcaaagtgccatattttttgcgatgtctgactggcaaccgatgtgacctgtagtagatcatgcactattcagggctgtagaaattcaagaatgagatcccaaatacaatttctgtaagatcatcatcaggcactgtcatcattgggaatcaaatattttttgcttgactgtatggttgctgtacttacttctaaatagtggcgatggcagagctggacttttaatggttgctgttgttaagtaattcacagatgtcagtgttgcaatgaatttgagtactacttataaatacattgttatgttgccagaattaattaaggatctaaacgcaaactcaggcactcccaaatatgtttgacagccggagctccatagcattgtagaatagcatgcaaaacacctggagcgtcatcctatgggtcccgaaaattcggcgcaacccttcactccagcaaaacttcaactgatttttgctcaaaatgattaaaaaagacttgctccttgcttttagcttcaggaaaaaaagtgttgtctttaaatatgaaaatgtttgaggatttttcatgaattatttcacaagcatgaaaatatgctctttgattttaaaagttcgcaaactttaaaaagtactcacgacttttcaaaaatgttcttcaatannnnnnnnnnnnnnnnnnnnnnnnnnnnnnnnnnnnnnnnnnnnnnnnnnnnnnnnnnnnnnnnnttcaaagataatttgctaccacaaaaaaacaaaagggaaaaagcaaaaactgtatacccaataaaacggtgcagtccttcactccacaaaaccgtatactgatgttcactcaaaatgcttaaaaacaatggtagctcctcgcttaggctaaactctgtttttttgatacattctaaaaatgtgtgaagaataaaaatccacgaattttaaaagtcattccagatttttttaaatattcaccaatatgaaaaaatatttaatgatttttataaatttcttacaaactttaaatacattcatgaatttgaaaaaaataatgttcaaatatatgaaaagtgttcacgaatttcaaaaatgttcacgaatttgattgaattttttaacaggcacgaaagttttttcttgaattttaaaagttcatgaattttcactattgttccacaattaaaatgggaaaggtaaaaataaaaaaaggagaagaagaacgaaaaactcaaacgactggagaagaacaaaaacaaaatagaaggaagttgttaaaccaacaaagagaacgcagcaaaaaggatataagaaaaatcaggcagaacattccgaaagctgggaaaacctatcccatacacgcaccagcctattaccgtcaggggtgctcgttctgtacagagaacgggtgagaaataggattttctgttggttgcaatatttttttaaaggaaactcgagttgcgcatttctgaaaaatttgtgagccgaccaaatactcctgaacatatatagcgcttgggtgatccgaatttacaaaaaggaacgctgcgtattttgaccagaattaatatttgctgagattatgtatgaaaactgaaaaacaacccaaaaaaataaaaattaacctatcaggaatattggtttaagcaatgagacatgcgtgctggcgttctggtaatcctttttacctcattgaattagattttttaaataattgtcagtttggtagaaagtgggactggcttacttgcatatttctaaaccttgttgcatttttagtctgacagttcttatatttctggattctcaaaatttgggttaattttttttaagtggtaaaggtatcattgagccgttgtgaactaatttctgaaagcaatcaatttaattttctacagacaaatgtggaatttgcgtattatcactttatcaggcatcaaagtgatgcatatattctgaaatgtttttatgtagcatagtcttcgtttgagtttgataaatttctgctcattgatcctgagtaggatggttcttttctcctgctctaagctcactgtgtggagtttattagtgtaactacttgatgaatttggtgatttcttcaacagatggctgaagaagccggcgaggctgaatcacgaatatagaacttgcataatctttaatttcagtttgataaatttccgctcatcgattctgagtcggatggcttattttctcctgctccaagcttatgtgacaattacttgatgaacttggttaatttttcaacagaaagctgaagaagatggcggggttgtgtcacgcatggatggctgagagtttacagtctgtgatcgttcttacgnnnnnnnnnnnnnnnnnnnnnnntttgtatagattaatgtttcttggagagattaattatatggaggttattgatgaattctcttcattgcagctcttgggtcggatctgacctgctactgaagatattaagaagaaaggaattgatttctctggggtttaagcctgacaaagtaccctaacaacttctaaatcatgcaccggttcagttagttgctcaacaaccatgtacttaggctgactgacagtgcatttcaaagccctttgactcaagtggctggaatacagaaaaaggagcagagctctaaacgagctgcagtcgacaccgtttgattaatgtctgcaaagagtaccgtttgacagtgcatagtttctgcctgttgtacttggaaaaatgtgaataagaattttgtcaatcatggatgataccaggatttctggagaagatgaatttgtcactggtgaaagataaatgtgatggcactgtcctgccatcttcattcaacgaacaggtttgtatcagaaattcagaattcagaaacgtgcttagatgtaaactcggtgaaacaaagagtcttaaaactctcgatttccacctggaatttgatttctcaagtcaaaacaaaccaacaagccagcctttgctagcgtttgtatcagttatctgtctttcggagttaaaccagttaaacgttgcttgatagattgagctgagaagaagtgaatggtttcagtttgctgaaatgaagggactaacaagacctgccatactttgtagcatgaacatcaatcacccttgctatattttacacagggtcgatgacgaaatgaaaagacactctctctgttgtgaacataacattgttctgattctgatgtggtgtgtcaagaggaagcacgcaagccatttctgtactattggtaatactacaaaagcataaagcatgggaaactctgtttcgagactactactagagtttcatggatgatctcaggaataataattgacttaaaataccagtcttacttctttactgcattttttcataagtaccagttaactggtagtagcactaagtactgtgaaatggcccttgttacgtctgaacgaattgattaatattactacatgggaattgccatcacacctccaaccaactagccagataataagaaagaaacacacagactctgttactgaagttccacgaagtacaaactacatgacatcacttgtctttgacacatacagtggatgggcataacttaaaaagaatgttgagcttcagttcatgacatctgctctgcattcatgcattcagaagctccaatcacatccagcaggatgtagctcccctttcacctgatcaaaccaaggtttcgattatatcatatatata

SEQ ID NO: 32 - DNA, 20 bp, Artificial Sequence
  Synthetic Polynucleotide
caaacaccacaacagctatg

SEQ ID NO: 33 - DNA, 19 bp, Artificial Sequence
  Synthetic Polynucleotide
cagcccgaaggaaaacaat

SEQ ID NO: 34 - DNA, 154 bp, Artificial Sequence
  Synthetic Polynucleotide
caaacaccacaacagctatgtcttcaactcgctgcagccctctgcttcacccccgctacagtctatccaggaagatgcgcgcctctggggtagggcaagagccaaaggaatgaatatgcttccgagagttaggccattgttttccttcgggctg

SEQ ID NO: 35 - DNA, 608 bp, Artificial Sequence
  Synthetic Polynucleotide
tggtgtctgtatcatctagtcttttcagttttagttcaccattggttgtcttaaccatttctgctacctttggtattcgggttgtgactataatcaaattaccctgagactctaccttctttaaaggtgttattagttttttccactcatcctcctgatatgtccacacatcatccaagacaagtaaaaacctcttaccttttaatctttgttggataagttcttcggcactagcgttaaccttttcaccaacaacactatcgattttttttactatctcttgtgccaacctatctgcactgaaatcgaaagagacacatatccaaattgaagcctggaagtagctactcacttcttggcatatgtgttgcgtaaaagttgtttttccaataccccccggtccaaaaattggaagcacgttaagtttattgggacagtactcgcgactaataatgcaatctacaattttctttttttggtcatccctcccatataactcaggttctataatctctgatgtggtctttgatctgttttttgcaatttctttggtatggttacggctggaacccaacaaatctagattaagaattatggagaccttagca

SEQ ID NO: 36 - DNA, 625 bp, Artificial Sequence
  Synthetic Polynucleotide
tgcagcggtgagaagagcgaacaatggagcctccagctttattacctacgacgacatctccaagctcaagtacactgctaaggtactaaagtacaaacatttttttacagtaaggaagctgaggcccggcgttaaatcagtgatgcgtttacagagaacaacacaacatgccgccacacatgacctgaaaacgaaactgcaaaggaaaactcatcaccaatgacattctatatattccaactttcacttcagtatgtaaaactaacttggattacttatattgtttttggatttgtaatcaatgacaccatatgtaacaaaacatgtatatattactccctccgttcccaaatgtaagtctttgtagaaatttcattataaactgcatacggatgtatatagatgcattttaagtttagattcattcattttgctccttatgtagtccatctagtgcaatctctacaaagacttatatttaggagcggagggagtacgatgcaacatactgcaaggcggtgcccgatcaacccctcctcatatgcgaacctggacgatttagctataaatgagttgtgttagtctagtacattttgtaattcacttatctgtacccctaactgca

SEQ ID NO: 37 - DNA, 19 bp, Artificial Sequence
  Synthetic Polynucleotide
caattggcataagagcctt

SEQ ID NO: 38 - DNA, 19 bp, Artificial Sequence
  Synthetic Polynucleotide
caattggcataagagcctt

SEQ ID NO: 39 - DNA, 144 bp, Artificial Sequence
  Synthetic Polynucleotide
caattggcataagagccttgtcgatccgaggcgactgtggcggtgcggcggactccatgtgaaggggacgtcagcggcgaaaggtggacgccgttggcggcgcgatgctgctagcggtgggtgtgtgtcttcatcatcgtcgag

SEQ ID NO: 40 - DNA, 17 bp, Artificial Sequence
  Synthetic Polynucleotide
ggccagtgcaataaact

SEQ ID NO: 41 - DNA, 18 bp, Artificial Sequence
  Synthetic Polynucleotide
atttgtagtaagagtgcg

SEQ ID NO: 42 - DNA, 214 bp, Artificial Sequence
  Synthetic Polynucleotide
ggccagtgcaataaactaataacacaaatctaattagtgccaaaactagaacgaaataaaattatctttgtgcatgccctcattgccgtgaaaggggcagcaaattagctgcagtatctcatgcgtacaccatgttctttgtagtaaatcaggaagaaacatgcaaaacccacgaattactcaacactaagcatgccgcactcttactacaaat

SEQ ID NO: 43 - DNA, 18 bp, Artificial Sequence
  Synthetic Polynucleotide
aaaagaaagttggccccg

SEQ ID NO: 44 - DNA, 24 bp, Artificial Sequence
  Synthetic Polynucleotide
cggcatgattaaaacatgaggcaa

SEQ ID NO: 45 - DNA, 128 bp, Artificial Sequence
  Synthetic Polynucleotide
aaaagaaagttggccccgaaatgtaactgcatgcaggatgtatggtttatgatgttgatgaaggatggaatacaccacaccatggggggcgatgtttgagagccttgcctcatgttttaatcatgccg

SEQ ID NO: 46 - DNA, 17 bp, Artificial Sequence
  Synthetic Polynucleotide
tcatcgatgggatcgac

SEQ ID NO: 47 - DNA, 18 bp, Artificial Sequence
  Synthetic Polynucleotide
atgtccacctgtcccaag

SEQ ID NO: 48 - DNA, 209 bp, Artificial Sequence
  Synthetic Polynucleotide
tcatcgatgggatcgaccatgaggtgcaaagggaagaagagactggatgcttcaggctatgggtatggatggatgcagtacagaagctcaagacgagaggcgtgctgcatgcagcttgaggagccacgggagaggggctcgcccgggatgcatttccttgagctcaacatcctcaaggaggtgccgcaacgcttgggacaggtggacat

SEQ ID NO: 49 - DNA, 18 bp, Artificial Sequence
  Synthetic Polynucleotide
atcctatcgctcaacatg

SEQ ID NO: 50 - DNA, 18 bp, Artificial Sequence
  Synthetic Polynucleotide
acagttagcttggcttca

SEQ ID NO: 51 - DNA, 147 bp, Artificial Sequence
  Synthetic Polynucleotide
atcctatcgctcaacatgttctggttcacttttttagatgaagatgggaataacctgcttaacatcttctggttcacttttgtagatgaatatgggaataacctgcatgcagtcacgggaatggagtgatgaagccaagctaactgt

SEQ ID NO: 52 - DNA, 18 bp, Artificial Sequence
  Synthetic Polynucleotide
gctgcgtaaaattaagca

SEQ ID NO: 53 - DNA, 20 bp, Artificial Sequence
  Synthetic Polynucleotide
cttttagtcaattcttggtc

SEQ ID NO: 54 - DNA, 180 bp, Artificial Sequence
  Synthetic Polynucleotide
gctgcgtaaaattaagcattatgaacaagcaatcaggcggatttttagggataattcactaatgtggttaacttatttctagtaatgtagaaggttcaacttttgactgcatgcagaaccaaatagctctaggtgacagaccagagatcccataagttacgaccaagaattgactaaaag

SEQ ID NO: 55 - DNA, 19 bp, Artificial Sequence
  Synthetic Polynucleotide
ctcaatcatttccgtctac

SEQ ID NO: 56 - DNA, 19 bp, Artificial Sequence
  Synthetic Polynucleotide
ctacgcaacaaggaaaaca

SEQ ID NO: 57 - DNA, 191 bp, Artificial Sequence
  Synthetic Polynucleotide
ctcaatcatttccgtctactcctacgcaatcgtgcgacgcttctgaagaatatgaaaaatatggtgtggatcttctgaaatccgaagcttcactgcagtacttatgcaacctaccacctcataggtctgctttacgttactaaaattggcgaagacttgtgattctgcattgtgttttccttgttgcgtag

SEQ ID NO: 58 - DNA, 19 bp, Artificial Sequence
  Synthetic Polynucleotide
ttaacgccagggcatactc

SEQ ID NO: 59 - DNA, 17 bp, Artificial Sequence
  Synthetic Polynucleotide
ctgcaggaggcgctgga

SEQ ID NO: 60 - DNA, 19 bp, Artificial Sequence
  Synthetic Polynucleotide
caattggcataagagcctg

SEQ ID NO: 61 - DNA, 19 bp, Artificial Sequence
  Synthetic Polynucleotide
catagccatcaccaccttg

SEQ ID NO: 62 - DNA, 219 bp, Artificial Sequence
  Synthetic Polynucleotide
caattggcataagagccttgtcgatccgaggcgactgtggcggtgcggcggactccatgtgaaggggacgtcagcggcgaaaggtggacgccgttggcggcgcgatgctgctagcggtgggtgtgtgtcttcatcatcgtcgagctgcatcacgagcgatggagagagatgtgctgctcggtaagttgtggcaccggcggcaaggtggtgatggctatg

1-40. (canceled)

41. A wheat plant comprising in its genome a heterologous polynucleotide segment conferring or enhancing resistance of the wheat plant to leaf rust and stripe rust diseases, wherein the heterologous polynucleotide segment comprises at least one scaffold having a nucleic acid sequence at least 70% homologous to the nucleic acid sequence set forth in any one of SEQ ID NOs:1-31 or a part thereof.

42. The wheat plant of claim 41, wherein the heterologous polynucleotide segment comprises at least one of:
a. at least one scaffold having a nucleic acid sequence at least 70%, 75%, 80%, 85%, 90%, or 95% homologous to a nucleic acid sequence selected from the group consisting of SEQ ID NO:1, SEQ ID NO:3, SEQ ID NO:31, SEQ ID NO:23, SEQ ID NO:2 and any combination thereof; and
b. a nucleic acid marker designated 2-3HS2, wherein the 2-3HS2 marker is amplified by a pair of primers comprising a forward primer comprising the nucleic acid sequence set forth in SEQ ID NO:32 and a reveres primer comprising the nucleic acid sequence set forth in SEQ ID NO:33, wherein said 2-3HS2 marker comprises a nucleic acid sequence at least 90% homologous to the nucleic acid sequence set forth in SEQ ID NO:34.

43. The wheat plant of claim 41, wherein the heterologous polynucleotide segment comprises a fragment of chromosome 6Ssh of Aegilops sharonensis Accession TH548, seed of which have been deposited with NCIMB Ltd. as the International Depositary Authority under Accession No. NCIMB 43567.

44. The wheat plant of claim 43, wherein the fragment of the Ae. sharonensis chromosome 6Ssh comprises at least one scaffold or a part thereof selected from the group consisting of: scaffold 19799 having the nucleic acid sequence of SEQ ID NO:1 positioned around 58Mbp; scaffold 00757 having the nucleic acid sequence of SEQ ID NO:3 positioned around 57.5Mbp; Scaffold 1934717 having the nucleic acid sequence of SEQ ID NO:31 positioned around 57.7 Mbp; scaffold 1549600 having the nucleic acid sequence of SEQ ID NO:23 positioned around 56Mbp; scaffold 20860 having the nucleic acid sequence of SEQ ID NO:2 positioned around 44Mbp; scaffold 1540406 having the nucleic acid sequence of SEQ ID NO:4 positioned around 32Mbp; scaffold 1900261 having the nucleic acid sequence of SEQ ID NO:5 positioned around 33Mbp; scaffold 1933170 having the nucleic acid sequence of SEQ ID NO:6 positioned around 34Mbp; scaffold 1531163 having the nucleic acid sequence of SEQ ID NO:7 positioned around 35Mbp; scaffold 1927703 having the nucleic acid sequence of SEQ ID NO:8 positioned around 35Mbp; scaffold 1895355 having the nucleic acid sequence of SEQ ID NO:9 positioned around 38Mbp; scaffold 1931208 having the nucleic acid sequence of SEQ ID NO:10 positioned around 38Mbp; scaffold 1935984 having the nucleic acid sequence of SEQ ID NO:11 positioned around 39Mbp; scaffold 1913977 having the nucleic acid sequence of SEQ ID NO:12 positioned around 42Mbp; scaffold 1916860 having the nucleic acid sequence of SEQ ID NO:13 positioned around 43Mbp; scaffold 1891763 having the nucleic acid sequence of SEQ ID NO:14 positioned around 44Mbp; scaffold 1937448 having the nucleic acid sequence of SEQ ID NO:15 positioned around 44Mbp; scaffold 1896571 having the nucleic acid sequence of SEQ ID NO:16 positioned around 46Mbp; scaffold 1528020 having the nucleic acid sequence of SEQ ID NO:17 positioned around 47Mbp; scaffold 1935712 having the nucleic acid sequence of SEQ ID NO:18 positioned around 47Mbp; scaffold 1893110 having the nucleic acid sequence of SEQ ID NO:19 positioned around 48Mbp or around 57Mbp; scaffold 1898148 having the nucleic acid sequence of SEQ ID NO:20 positioned around 51Mbp; scaffold 1934541 having the nucleic acid sequence of SEQ ID NO:21 positioned around 51Mbp; scaffold 1538547 having the nucleic acid sequence of SEQ ID NO:22 positioned around 56Mbp; scaffold 1872406 having the nucleic acid sequence of SEQ ID NO:24 positioned around 56Mbp; scaffold 1889560 having the nucleic acid sequence of SEQ ID NO:25 positioned around 58Mbp; scaffold 75951 having the nucleic acid sequence of SEQ ID NO:26 positioned around 58Mbp; scaffold 1893791 having the nucleic acid sequence of SEQ ID NO:27 positioned around 59Mbp; scaffold 1892710 having the nucleic acid sequence of SEQ ID NO:28 positioned around 61Mbp; scaffold 1926247 having the nucleic acid sequence of SEQ ID NO:29 positioned around 57.5 Mbp; Scaffold 1929618 having the nucleic acid sequence of SEQ ID NO:30 positioned around 57.4 Mbp; and any combination thereof.

45. The wheat plant of claim 41, wherein the heterologous polynucleotide segment is devoid of the nucleic acid sequence set forth in SEQ ID NO:35, SEQ ID NO:36, or a combination thereof.

46. The wheat plant of claim 41, wherein the heterologous polynucleotide segment is located within chromosome 6B of said wheat plant.

47. The wheat plant of claim 41, wherein the heterologous polynucleotide segment is a nucleic acid construct further comprising at least one regulatory element.

48. The wheat plant of claim 46, said wheat plant is selected from the group consisting of a plant homozygous for chromosome 6B comprising the heterologous polynucleotide segment and a plant heterozygous for chromosome 6B comprising a native wheat chromosome 6B and chromosome 6B comprising the heterologous polynucleotide segment.

49. The wheat plant of claim 41, said wheat plant shows a phenotype of enhanced resistance or tolerance to leaf rust and stripe rust diseases compared to a corresponding plant not comprising within its genome the heterologous polynucleotide segment.

50. A nucleic acid construct comprising an isolated polynucleotide comprising at least one scaffold having a nucleic acid sequence at least 70% homologous to a nucleic acid sequence set forth in any one of SEQ ID NOs:1-31 or a part thereof and at least one regulatory element, wherein the construct, when introduced into a wheat plant, confers or enhances resistance of the wheat plant to leaf rust disease and strip rust disease.

51. The construct of claim 50, wherein the isolated polynucleotide comprises at least one of
a. a nucleic acid sequence at least 70%, 75%, 80%, 85%, 90%, or 95% 95% homologous to a nucleic acid sequence selected from the group consisting of SEQ ID NO:1, SEQ ID NO:3, SEQ ID NO:31, SEQ ID NO:23, SEQ ID NO:2 and any combination thereof; and
b. a nucleic acid marker designated 2-3HS2, wherein the 2-3HS2 marker is amplified by a pair of primers comprising a forward primer comprising the nucleic acid sequence set forth in SEQ ID NO:32 and a reveres primer comprising the nucleic acid sequence set forth in SEQ ID NO:33, wherein said 2-3HS2 marker comprises a nucleic acid sequence at least 90% homologous to the nucleic acid sequence set forth in SEQ ID NO:34.

52. The construct of claim 50, wherein the isolated polynucleotide comprises a fragment of chromosome 6S sh of Aegilops sharonensis Accession TH548, seed of which have been deposited with NCIMB Ltd. as the International Depositary Authority under Accession No. NCIMB 43567.

53. The construct of claim 50, wherein the polynucleotide segment is devoid of the nucleic acid sequence set forth in SEQ ID NO:35, SEQ ID NO:36, or a combination thereof.

54. A method for producing a wheat plant having enhanced resistance to leaf rust and strip rust diseases, the method comprises introducing into at least one cell of a wheat plant susceptible to the rust diseases a heterologous polynucleotide segment or a nucleic acid construct comprising same, wherein the heterologous polynucleotide segment comprises at least one scaffold having a nucleic acid sequence at least 70% homologous to the nucleic acid sequence set forth in any one of SEQ ID NOs:1-31, thereby producing a wheat plant having enhanced resistance to said rust diseases compared to a corresponding control plant.

55. The method of claim 54, wherein the heterologous polynucleotide segment or the construct comprising same is introduced by a method selected from the group consisting of transforming into at least one cell of the wheat plant said isolated polynucleotide or construct comprising same and subjecting at least one cell of the wheat plant to genome editing using artificially engineered nucleases.

56. The method of claim 54, wherein the heterologous polynucleotide segment forms part of chromosome 6Ssh of Ae. sharonensis Accession TH548, said method comprises crossing the Ae. sharonensis Accession TH548 with the wheat plant susceptible to the rust disease.

57. The method of claim 54, wherein the heterologous polynucleotide segment is introduced into chromosome 6B of the at least one cell of the susceptible wheat plant.

58. A method for identifying and selecting wheat plants having enhanced resistance to leaf rust and stripe resistance, comprising the steps of:
a. providing a plurality of wheat plants;
b. examining a nucleic acid sample obtained from each of the plurality of wheat plants for the presence of a heterologous polynucleotide segment comprising at least one scaffold having a nucleic acid sequence at least 70% homologous to a nucleic acid sequence set forth in any one of SEQ ID NOs:1-31 or parts thereof; optionally
c. examining a nucleic acid sample obtained from each of the plurality of wheat plant for the presence of a marker having the nucleic acid sequence set forth in SEQ ID NO:34; and
d. selecting wheat plants comprising the heterologous polynucleotide segment.

59. The method of claim 58, wherein the control plant is a wheat plant susceptible to the rust diseases.

60. The method of claim 59, wherein the control plant is of the same genetic background.
